(19) United States
(12) Patent Application Publication
(10) Pub. No.: US 2025/0369013 A1
(43) Pub. Date: Dec. 4, 2025

(54) ADENOVIRAL HELPER VECTORS

(71) Applicant: Ensoma, Inc., Boston, MA (US)

(72) Inventor: Soumitra Roy, Townsend, DE (US)

(21) Appl. No.: 18/877,814

(22) PCT Filed: Jun. 28, 2023
(86) PCT No.: PCT/US2023/026399

§ 371 Date: Dec. 20, 2024

Related U.S. Application Data
(60) Provisional application No. 63/356,821, filed on Jun. 29, 2022.

(51) Int. Cl. C12N 15/86; C12N 7/00

(52) U.S. Cl. CPC C12N 15/86; C12N 7/00; C12N 2710/10321; C12N 2710/10343; C12N 2710/10352; C12N 2800/30

(57) ABSTRACT

The present disclosure provides, among other things, helper genomes and vectors useful in gene therapy, e.g., for production of helper-dependent donor vectors. Helper genomes of the present disclosure include a conditionally defective packaging sequence.

### PRIORITY APPLICATION

[0001] The present application claims the benefit of U.S. Provisional Patent Application No. 63/356,821, filed Jun. 29, 2022, the content of which is hereby incorporated by reference herein in its entirety.

### BACKGROUND

[0002] Many medical conditions are caused by genetic mutation and/or are treatable, at least in part, by gene therapy. Some conditions are particularly treatable by modification of target cells such as hematopoietic stem cells (HSCs). Compositions and methods for gene therapy are therefore needed.

### SUMMARY

[0003] Gene therapy can treat many conditions that have a genetic component, including without limitation hemoglobinopathies, immune deficiencies, and cancers. In various gene therapies, hematopoietic stem cells (HSCs) are an important target. However, current methods and compositions for gene therapy, and particularly for modifying HSCs, are limited. For instance, some vectors for gene therapy such as lentiviral vectors have a relatively limited payload capacity. Others, such as adenoviral serotype 5 (Ad5) vectors, are characterized by substantial payload capacity but are sufficiently prevalent such that the majority of humans have antibodies directed against proteins of such vectors, some of which antibodies may be neutralizing. The present disclosure provides, among other things, adenoviral helper genomes and vectors useful in gene therapy, e.g., for production of helper-dependent adenoviral donor vectors.

[0004] The present disclosure includes, among other things, Ad3, Ad7, Ad11, Ad14, Ad16, Ad21, Ad34, or Ad50 serotype helper vectors and Ad3, Ad7, Ad11, Ad14, Ad16, Ad21, Ad34, or Ad50 serotype helper genomes (e.g., “recombinant” or “engineered” adenoviral vectors and genomes). Adenoviral helper-dependent vectors are a type of vector that can be particularly useful for viral gene therapy, e.g., where the vector includes a donor genome that encodes a therapeutic payload for delivery to a recipient. Donor genomes of adenoviral helper-dependent vectors are engineered to remove viral coding sequences that are required for viral propagation and/or contribute to viral propagation, such that the helper-dependent vectors are deficient for propagation in recipients (e.g., human recipients receiving gene therapy including the helper-dependent vector). Because adenoviral helper-dependent donor genomes do not encode proteins used in viral production, they are dependent on other sources of viral proteins (e.g., expression from an adenoviral “helper” genome of the same serotype). For example, for packaging into vector, helper-dependent adenoviral genomes can be delivered to a cell that includes a nucleic acid sequence that provides viral proteins in trans. Viral proteins can be provided by an adenoviral helper genome engineered to reduce or eliminate packaging of the helper genome into helper-dependent donor vectors. Packaging of adenoviral helper genome into adenoviral donor vectors risks propagation in the recipient.

[0005] Adenoviral helper vectors must be conditionally competent (i.e., conditionally deficient or conditionally defective) for propagation. One means of achieving conditional propagation deficiency is by engineering of a conditionally defective packaging sequence in the helper genome (e.g., a packaging sequence that can mediate packaging of the helper genome, or mediate packaging of the helper genome more efficiently, in a first state or condition as compared to a second state or condition). The present disclosure includes, among other things, adenoviral helper genomes that include two recombinase sites positioned such that the two recombinase sites flank a packaging sequence, where the two recombinase sites are sites for the same recombinase. Positions of such recombinase sites to produce a conditionally defective packaging sequence in an adenoviral helper vector cannot be predicted from existing knowledge relating to other vectors. To the contrary, relevant sequences of Ad3, Ad7, Ad11, Ad14, Ad16, Ad21, Ad34, and Ad50 serotype genomes are very different from, e.g., corresponding sequences of Ad5 (compare, e.g., the 5′ 600 to 620 nucleotides of Ad3, Ad7, Ad11, Ad14, Ad16, Ad21, Ad34, or Ad50 and Ad5). Moreover, packaging sequences are serotype-specific. The Ad3, Ad7, Ad11, Ad14, Ad16, Ad21, Ad34, and Ad50 packaging sequence includes sequences that correspond to at least Ad5 packaging signal sequences AI, AII, AIII, AIV, and AV, but are unique to Ad3, Ad7, Ad11, Ad14, Ad16, Ad21, Ad34, and Ad50. Accordingly, production of an adenoviral helper vector requires several unpredictable determinations, including (1) identification of the adenoviral packaging sequence to be flanked by recombinase sites (e.g., loxP sites) by inserting or positioning recombinase sites in the subject genome, which is not straightforward where sequence similarity is limited; (2) identification of recombinase site insertions or positions that do not negate propagation of the helper vector (under conditions where the flanked packaging sequence is not excised), which cannot be predicted; and/or (3) identification of spacing between the recombinase sites that permits efficient deletion of the packaging sequence while reducing helper virus packaging during production of helper-dependent adenoviral donor vectors (e.g., in a cre recombinase-expressing cell line such as the 116 cell line). Thus, the present disclosure includes placement of recombinase sites (e.g., loxP recombinase sites) flanking adenoviral packaging sequences to produce conditionally defective packaging sequences in Ad3, Ad7, Ad11, Ad14, Ad16, Ad21, Ad34, and Ad50 helper genomes. In various embodiments, presence of the conditionally defective packaging sequence in an adenoviral helper genome renders the adenoviral helper genome conditionally defective for propagation, in that excision of the flanked adenoviral packaging sequence by recombination of the recombinase sites renders the adenoviral helper genome defective for packaging.

[0006] The present disclosure further includes the recognition that, in various embodiments, packaging sequence inversion can reduce the likelihood of mutations that bypass or disrupt conditionality of propagation and/or packaging. One problem that has characterized various donor vector production systems is that, when a helper genome is present in the same cell or system as a donor genome that includes a wild type or reference packaging sequence, all or a portion of a conditionally defective packaging sequence, or a genome fragment including the same, can be exchanged by homologous recombination with the donor genome for a corresponding fragment of the donor genome that includes the wild type or reference packaging sequence (which can be referred to herein as packaging sequence recombination). When packaging sequence recombination causes a modification of the helper genome that removes at least one of the recombinase sites flanking a packaging sequence of a conditionally defective packaging sequence, the event can be referred to as recombinase site-excising homologous recombination. When recombinase site-excising homologous recombination occurs, conditionality is lost. As a result, helper genomes can be packaged into vectors in the same manner as donor genomes (even in the presence of recombinases that would otherwise render the helper genome defective for packaging), and the production of donor vectors can be contaminated by production of vectors that include helper genomes.

[0007] Packaging sequence inversion as provided herein can reduce and/or eliminate recombinase site-excising homologous recombination at least in part by reducing overall homology between helper and donor genomes for any single strand orientation (particularly in packaging sequences and genome fragments including packaging sequences), thereby reducing the potential for packaging sequence recombination. While the present disclosure includes discussion of Ad3, Ad7, Ad11, Ad14, Ad16, Ad21, Ad34, and Ad50 vectors in particular, those of skill in the art will appreciate that packaging sequence inversion will be beneficial for helper genomes of diverse adenoviral serotypes and diverse types of viral vectors.

[0008] In at least one aspect, the present disclosure provides a recombinant adenoviral helper genome including: a 5′ inverted terminal repeat (ITR); a 3′ ITR; and a packaging sequence; where the 5′ ITR, the 3′ ITR, and the packaging sequence are each derived from a species B adenovirus of a serotype selected from Ad3, Ad7, Ad11, Ad14, Ad16, Ad21, Ad34, or Ad50; where the packaging sequence is flanked by or includes recombinase direct repeats including a first recombinase direct repeat and a second recombinase direct repeat; where the position of the first recombinase direct repeat corresponds to a position that is within 10 nucleotides of an L1, L2, L3, or L4 site of a reference sequence for the serotype of the packaging sequence, as set forth in Table 21; and where the position of the second recombinase direct repeat corresponds to a position that is within 10 nucleotides of an R1, R2, or R3 site of a reference sequence for the serotype of the packaging sequence, as set forth in Table 21. In various embodiments, the position of the first recombinase direct repeat corresponds to a position that is within 10 nucleotides of an L1 site of a reference sequence for the serotype of the packaging sequence, as set forth in Table 21; and the position of the second recombinase direct repeat corresponds to a position that is within 10 nucleotides of an R3 site of a reference sequence for the serotype of the packaging sequence, as set forth in Table 21. In various embodiments, the position of the first recombinase direct repeat corresponds to a position that is within 10 nucleotides of an L2 site of a reference sequence for the serotype of the packaging sequence, as set forth in Table 21; and the position of the second recombinase direct repeat corresponds to a position that is within 10 nucleotides of an R1 site of a reference sequence for the serotype of the packaging sequence, as set forth in Table 21. In various embodiments, the position of the first recombinase direct repeat corresponds to a position that is within 10 nucleotides of an L3 site of a reference sequence for the serotype of the packaging sequence, as set forth in Table 21; and the position of the second recombinase direct repeat corresponds to a position that is within 10 nucleotides of an R2 site of a reference sequence for the serotype of the packaging sequence, as set forth in Table 21. In various embodiments, the position of the first recombinase direct repeat corresponds to a position that is within 10 nucleotides of an L4 site of a reference sequence for the serotype of the packaging sequence, as set forth in Table 21; and the position of the second recombinase direct repeat corresponds to a position that is within 10 nucleotides of an R1 site of a reference sequence for the serotype of the packaging sequence, as set forth in Table 21.

[0009] In various embodiments, the position of the first recombinase direct repeat corresponds to a position at an L1, L2, L3, or L4 site of a reference sequence for the serotype of the packaging sequence, as set forth in Table 21; and where the position of the second recombinase direct repeat corresponds to a position that is at an R1, R2, or R3 site of a reference sequence for the serotype of the packaging sequence, as set forth in Table 21. In various embodiments, the position of the first recombinase direct repeat corresponds to a position at an L1 site of a reference sequence for the serotype of the packaging sequence, as set forth in Table 21; and the position of the second recombinase direct repeat corresponds to a position that is at an R3 site of a reference sequence for the serotype of the packaging sequence, as set forth in Table 21. In various embodiments, the position of the first recombinase direct repeat corresponds to a position at an L2 site of a reference sequence for the serotype of the packaging sequence, as set forth in Table 21; and the position of the second recombinase direct repeat corresponds to a position that is at an R1 site of a reference sequence for the serotype of the packaging sequence, as set forth in Table 21. In various embodiments, the position of the first recombinase direct repeat corresponds to a position at an L3 site of a reference sequence for the serotype of the packaging sequence, as set forth in Table 21; and the position of the second recombinase direct repeat corresponds to a position that is at an R2 site of a reference sequence for the serotype of the packaging sequence, as set forth in Table 21. In various embodiments, the position of the first recombinase direct repeat corresponds to a position at an L4 site of a reference sequence for the serotype of the packaging sequence, as set forth in Table 21; and the position of the second recombinase direct repeat corresponds to a position that is at an R1 site of a reference sequence for the serotype of the packaging sequence, as set forth in Table 21.

[0010] In various embodiments, the position of the first recombinase direct repeat corresponds to a position at an L1, L2, L3, or L4 site of a reference sequence for the serotype of the packaging sequence, as set forth in any one of Tables 22-27; and the position of the second recombinase direct repeat corresponds to a position that is at an R1, R2, or R3 site of a reference sequence for the serotype of the packaging sequence, as set forth in any one of Tables 22-27. In various embodiments, the position of the first recombinase direct repeat corresponds to a position at an L1 site of a reference sequence for the serotype of the packaging sequence, as set forth in any one of Tables 22-27; and the position of the second recombinase direct repeat corresponds to a position that is at an R3 site of a reference sequence for the serotype of the packaging sequence, as set forth in any one of Tables 22-27. In various embodiments, the position of the first recombinase direct repeat corresponds to a position at an L2 site of a reference sequence for the serotype of the packaging sequence, as set forth in any one of Tables 22-27; and the position of the second recombinase direct repeat corresponds to a position that is at an R1 site of a reference sequence for the serotype of the packaging sequence, as set forth in any one of Tables 22-27. In various embodiments, the position of the first recombinase direct repeat corresponds to a position at an L3 site of a reference sequence for the serotype of the packaging sequence, as set forth in any one of Tables 22-27; and the position of the second recombinase direct repeat corresponds to a position that is at an R2 site of a reference sequence for the serotype of the packaging sequence, as set forth in any one of Tables 22-27. In various embodiments, the position of the first recombinase direct repeat corresponds to a position at an L4 site of a reference sequence for the serotype of the packaging sequence, as set forth in any one of Tables 22-27; and the position of the second recombinase direct repeat corresponds to a position that is at an RI site of a reference sequence for the serotype of the packaging sequence, as set forth in any one of Tables 22-27.

[0011] In various embodiments, the 5′ ITR and the 3′ ITR are derived from the same serotype. In various embodiments, the 5′ ITR, the 3′ ITR, and the packaging sequence are derived from the same serotype. In various embodiments, the recombinase direct repeats that flank the packaging sequence are FRT, loxP, rox, vox, AttB, or AttP sites. In various embodiments, the recombinase direct repeats that flank the packaging sequence are loxP sites. The present disclosure includes a recombinant adenoviral helper vector including a helper genome of the present disclosure.

[0012] In at least one aspect, the present disclosure provides a recombinant adenoviral vector production system including: (i) a helper genome of the present disclosure, and (ii) a helper-dependent adenoviral (HDAd) donor genome, the HDAd donor genome including: a 5′ inverted terminal repeat (ITR); a 3′ ITR; a packaging sequence; and a nucleic acid sequence encoding at least one heterologous expression product; where the 5′ ITR, the 3′ ITR, and the packaging sequence of the HDAd donor genome are each derived from a species B adenovirus of a serotype selected from Ad3, Ad7, Ad11, Ad14, Ad16, Ad21, Ad34, or Ad50. In various embodiments, the 5′ ITR and the 3′ ITR of the HDAd donor genome are derived from the same serotype. In various embodiments, the 5′ ITR, the 3′ ITR, and the packaging sequence of the HDAd donor genome are derived from the same serotype.

[0013] In at least one aspect, the present disclosure provides a method of producing a recombinant helper-dependent adenoviral (HDAd) donor vector, the method including isolating the recombinant HDAd donor vector from a culture of cells, where the cells include: a recombinant helper genome of the present disclosure or a recombinant adenoviral helper vector of the present disclosure; and a recombinant HDAd donor genome including: a 5′ inverted terminal repeat (ITR); a 3′ ITR; a packaging sequence; and a nucleic acid sequence encoding at least one heterologous expression product; where the 5′ ITR, the 3′ ITR, and the packaging sequence of the HDAd donor genome are each derived from a species B adenovirus of a serotype selected from Ad3, Ad7, Ad11, Ad14, Ad16, Ad21, Ad34, or Ad50. In various embodiments, the 5′ ITR and the 3′ ITR of the HDAd donor genome are derived from the same serotype. In various embodiments, the 5′ ITR, the 3′ ITR, and the packaging sequence of the HDAd donor genome are derived from the same serotype.

[0014] In various embodiments, a helper genome of the present disclosure includes an inverted packaging sequence.

[0015] In at least one aspect, the present disclosure provides a recombinant adenoviral helper genome including: a 5′ inverted terminal repeat (ITR); a 3′ ITR; and a packaging sequence; where the 5′ ITR, the 3′ ITR, and the packaging sequence are each derived from a species B adenovirus of a serotype selected from Ad3, Ad7, Ad11, Ad14, Ad16, Ad21, Ad34, or Ad50; where the packaging sequence is flanked by or includes recombinase direct repeats including a first recombinase direct repeat and a second recombinase direct repeat; where the position of the first recombinase direct repeat corresponds to a position that is within 10 nucleotides of an L1, L2, L3, or L4 site of a reference sequence for the serotype of the packaging sequence, as set forth in Table 21; and where the position of the second recombinase direct repeat corresponds to a position that is within 10 nucleotides of an R1, R2, or R3 site of a reference sequence for the serotype of the packaging sequence, as set forth in Table 21; and where the helper genome includes an inverted packaging sequence. In various embodiments, the 5′ ITR and the 3′ ITR are derived from the same serotype. In various embodiments, the 5′ ITR, the 3′ ITR, and the packaging sequence are derived from the same serotype. In various embodiments, the recombinase direct repeats that flank the packaging sequence are FRT, loxP, rox, vox, AttB, or AttP sites. In various embodiments, the recombinase direct repeats that flank the packaging sequence are loxP sites. The present disclosure includes a recombinant adenoviral helper vector including a helper genome of the present disclosure.

[0016] In at least one aspect, the present disclosure provides a recombinant adenoviral vector production system including: (i) a helper genome of the present disclosure or a helper vector of the present disclosure, and (ii) a helper-dependent adenoviral (HDAd) donor genome, the HDAd donor genome including: a 5′ inverted terminal repeat (ITR); a 3′ ITR; a packaging sequence; and a nucleic acid sequence encoding at least one heterologous expression product; where the 5′ ITR, the 3′ ITR, and the packaging sequence of the HDAd donor genome are each derived from a species B adenovirus of a serotype selected from Ad3, Ad7, Ad11, Ad14, Ad16, Ad21, Ad34, or Ad50. In various embodiments, the 5′ ITR and the 3′ ITR of the HDAd donor genome are derived from the same serotype. In various embodiments, the 5′ ITR, the 3′ ITR, and the packaging sequence of the HDAd donor genome are derived from the same serotype.

[0017] In at least one aspect, the present disclosure provides a method of producing a recombinant helper-dependent adenoviral (HDAd) donor vector, the method including isolating the recombinant HDAd donor vector from a culture of cells, where the cells include: a recombinant helper genome of the present disclosure or a recombinant adenoviral helper vector of the present disclosure; and a recombinant HDAd donor genome including: a 5′ inverted terminal repeat (ITR); a 3′ ITR; an packaging sequence; and a nucleic acid sequence encoding at least one heterologous expression product; where the 5′ ITR, the 3′ ITR, and the packaging sequence of the HDAd donor genome are each derived from a species B adenovirus of a serotype selected from Ad3, Ad7, Ad11, Ad14, Ad16, Ad21, Ad34, or Ad50. In various embodiments, the 5′ ITR and the 3′ ITR of the HDAd donor genome are derived from the same serotype. In various embodiments, the 5′ ITR, the 3′ ITR, and the packaging sequence of the HDAd donor genome are derived from the same serotype.

[0018] In various embodiments, a helper genome of the present disclosure includes a nucleic acid sequence that encodes an Ad35 fiber knob. In various embodiments, the Ad35 fiber knob includes a mutation that increases affinity with CD46. In various embodiments, the Ad35 fiber knob includes one or more mutations: selected from Ile192Val, Asp207Gly (or Glu207Gly), Asn217Asp, Thr226Ala, Thr245Ala, Thr254Pro, Ile256Leu, Ile256Val, Arg259Cys, and Arg279His; or including each of mutations Ile192Val, Asp207Gly (or Glu207Gly), Asn217Asp, Thr226Ala, Thr245Ala, Thr254Pro, Ile256Leu, Ile256Val, Arg259Cys, and Arg279His.

[0019] In various embodiments, a helper genome of the present disclosure is present in a cell that includes a nucleic acid encoding a recombinase for recombination of the direct repeats. In various embodiments, the recombinase is a Flp, Cre, Dre, Vika, or PhiC31 recombinase. In various embodiments, the cell is a HEK293 cell, optionally where the cell is a HEK293 cell that encodes or expresses Cre recombinase, optionally where the HEK293 cell that encodes or expresses Cre recombinase is a 116 cell.

[0020] In various embodiments, an inverted packaging sequence includes a packaging sequence and one or both of a first recombinase direct repeat and a second recombinase direct repeat. In various embodiments, the inverted packaging sequence includes, or includes a first end point at, a nucleotide position corresponding to a position that is within 25 nucleotides of a Left Inversion Point of a reference sequence for the serotype of the packaging sequence (e.g., at the Left Inversion Point, no more than 25 nucleotides 5′ of the Left Inversion Point, and/or no more than 25 nucleotides 3′ of the Left Inversion Point), as set forth in Table 28. In various embodiments, the inverted packaging sequence includes, or includes a first end point at, a nucleotide position corresponding to a position that is within 10 nucleotides of a Left Inversion Point of a reference sequence for the serotype of the packaging sequence, as set forth in Table 28. In various embodiments, the inverted packaging sequence includes, or includes a first end point at, a nucleotide position corresponding to a position at a Left Inversion Point of a reference sequence for the serotype of the packaging sequence, as set forth in Table 28. In various embodiments, the inverted packaging sequence includes, or includes a first end point at, a nucleotide position corresponding to a position at a Left Inversion Point of a reference sequence for the serotype of the packaging sequence, as set forth in any one of Tables 29-35. In various embodiments, the inverted packaging sequence includes, or includes a second end point at, a nucleotide position corresponding to a position that is within 25 nucleotides of a Right Inversion Point of a reference sequence for the serotype of the packaging sequence (e.g., at the Right Inversion Point, no more than 25 nucleotides 5′ of the Right Inversion Point, and/or no more than 25 nucleotides 3′ of the Right Inversion Point), as set forth in Table 28. In various embodiments, the inverted packaging sequence includes, or includes a second end point at, a nucleotide position corresponding to a position that is within 10 nucleotides of a Right Inversion Point of a reference sequence for the serotype of the packaging sequence, as set forth in Table 28. In various embodiments, the inverted packaging sequence includes, or includes a second end point at, a nucleotide position corresponding to a position at a Right Inversion Point of a reference sequence for the serotype of the packaging sequence, as set forth in Table 28. In various embodiments, the inverted packaging sequence includes, or includes a second end point at, a nucleotide position corresponding to a position at a Right Inversion Point of a reference sequence for the serotype of the packaging sequence, as set forth in any one of Tables 29-35.

[0021] In at least one aspect, the present disclosure provides a recombinant recombinase site-flanked adenoviral packaging sequence, where recombinase direct repeats flank a packaging sequence, and where the packaging sequence is derived from a species B adenovirus of a serotype selected from Ad3, Ad7, Ad11, Ad14, Ad16, Ad21, Ad34, or Ad50; and where the packaging sequence corresponds to a fragment of an adenoviral genome having: (i) a first end point that corresponds to a position that is within 10 nucleotides of an L1, L2, L3, or L4 site of a reference sequence for the serotype of the packaging sequence, as set forth in Table 21, and (ii) a second end point that corresponds to a position that is within 10 nucleotides of an R1, R2, or R3 site of a reference sequence for the serotype of the packaging sequence, as set forth in Table 21.

[0022] In various embodiments, the first end point corresponds to a position that is within 10 nucleotides of an L1 site of a reference sequence for the serotype of the packaging sequence, as set forth in Table 21; and the second end point corresponds to a position that is within 10 nucleotides of an R3 site of a reference sequence for the serotype of the packaging sequence, as set forth in Table 21. In various embodiments, the first end point corresponds to a position that is within 10 nucleotides of an L2 site of a reference sequence for the serotype of the packaging sequence, as set forth in Table 21; and the second end point corresponds to a position that is within 10 nucleotides of an R1 site of a reference sequence for the serotype of the packaging sequence, as set forth in Table 21. In various embodiments, the first end point corresponds to a position that is within 10 nucleotides of an L3 site of a reference sequence for the serotype of the packaging sequence, as set forth in Table 21; and the second end point corresponds to a position that is within 10 nucleotides of an R2 site of a reference sequence for the serotype of the packaging sequence, as set forth in Table 21. In various embodiments, the first end point corresponds to a position that is within 10 nucleotides of an L4 site of a reference sequence for the serotype of the packaging sequence, as set forth in Table 21; and the second end point corresponds to a position that is within 10 nucleotides of an R1 site of a reference sequence for the serotype of the packaging sequence, as set forth in Table 21.

[0023] In various embodiments, the first end point corresponds to a position at an L1, L2, L3, or L4 site of a reference sequence for the serotype of the packaging sequence, as set forth in Table 21; and the second end point corresponds to a position at an R1, R2, or R3 site of a reference sequence for the serotype of the packaging sequence, as set forth in Table 21. In various embodiments, the first end point corresponds to a position at an L1 site of a reference sequence for the serotype of the packaging sequence, as set forth in Table 21; and the second end point corresponds to a position at an R3 site of a reference sequence for the serotype of the packaging sequence, as set forth in Table 21. In various embodiments, the first end point corresponds to a position at an L2 site of a reference sequence for the serotype of the packaging sequence, as set forth in Table 21; and the second end point corresponds to a position at an R1 site of a reference sequence for the serotype of the packaging sequence, as set forth in Table 21. In various embodiments, the first end point corresponds to a position at an L3 site of a reference sequence for the serotype of the packaging sequence, as set forth in Table 21; and the second end point corresponds to a position at an R2 site of a reference sequence for the serotype of the packaging sequence, as set forth in Table 21. In various embodiments, the first end point corresponds to a position at an L4 site of a reference sequence for the serotype of the packaging sequence, as set forth in Table 21; and where the second end point corresponds to a position at an R1 site of a reference sequence for the serotype of the packaging sequence, as set forth in Table 21.

[0024] In various embodiments, the first end point corresponds to a position at an L1, L2, L3, or L4 site of a reference sequence for the serotype of the packaging sequence, as set forth in any one of Tables 22-27; and the second end point corresponds to a position at an R1, R2, or R3 site of a reference sequence for the serotype of the packaging sequence, as set forth in any one of Tables 22-27. In various embodiments, the first end point corresponds to a position at an L1 site of a reference sequence for the serotype of the packaging sequence, as set forth in any one of Tables 22-27; and the second end point corresponds to a position at an R3 site of a reference sequence for the serotype of the packaging sequence, as set forth in any one of Tables 22-27. In various embodiments, the first end point corresponds to a position at an L2 site of a reference sequence for the serotype of the packaging sequence, as set forth in any one of Tables 22-27; and the second end point corresponds to a position at an R1 site of a reference sequence for the serotype of the packaging sequence, as set forth in any one of Tables 22-27. In various embodiments, the first end point corresponds to a position at an L3 site of a reference sequence for the serotype of the packaging sequence, as set forth in any one of Tables 22-27; and the second end point corresponds to a position at an R2 site of a reference sequence for the serotype of the packaging sequence, as set forth in any one of Tables 22-27. In various embodiments, the first end point corresponds to a position at an L4 site of a reference sequence for the serotype of the packaging sequence, as set forth in any one of Tables 22-27; and the second end point corresponds to a position at an RI site of a reference sequence for the serotype of the packaging sequence, as set forth in any one of Tables 22-27.

[0025] In various embodiments, the packaging sequence is present in an adenoviral genome and is inverted, optionally where the packaging sequence is inverted as compared to a 5′ ITR of the adenoviral genome.

[0026] In at least one aspect, the present disclosure provides a recombinant adenoviral helper genome including: a 5′ inverted terminal repeat (ITR); a 3′ ITR; and an inverted sequence including a packaging sequence; where the 5′ ITR, the 3′ ITR, and the packaging sequence are each derived from a species B adenovirus of a serotype selected from Ad3, Ad7, Ad11, Ad14, Ad16, Ad21, Ad34, or Ad50; and where the inverted sequence includes, or includes a first end point at, a nucleotide position corresponding to a position within 25 nucleotides of a Left Inversion Point (e.g., within 10 nucleotides of a Left Inversion Point, e.g., at a Left Inversion Point) of a reference sequence for the serotype of the packaging sequence, as set forth in Table 28; and where the inverted sequence includes, or includes a second end point at, a nucleotide position corresponding to a position within 25 nucleotides of a Right Inversion Point (e.g., within 10 nucleotides of a Right Inversion Point, e.g., at a Right Inversion Point) of a reference sequence for the serotype of the packaging sequence, as set forth in Table 28. In various embodiments, the 5′ ITR and the 3′ ITR are derived from the same serotype. In various embodiments, the 5′ ITR, the 3′ ITR, and the packaging sequence are derived from the same serotype. In various embodiments, recombinase direct repeats flank the packaging sequence.

### Definitions

[0027] A, An, The: As used herein, “a”, “an”, and “the” refer to one or to more than one (i.e., to at least one) of the grammatical object of the article. By way of example, “an element” discloses embodiments of exactly one element and embodiments including more than one element.

[0028] About: As used herein, term “about”, when used in reference to a value, refers to a value that is similar, in context to the referenced value. In general, those skilled in the art, familiar with the context, will appreciate the relevant degree of variance encompassed by “about” in that context. For example, in some embodiments, the term “about” may encompass a range of values that within 25%, 20%, 19%, 18%, 17%, 16%, 15%, 14%, 13%, 12%, 11%, 10%, 9%, 8%, 7%, 6%, 5%, 4%, 3%, 2%, 1%, or less of the referenced value.

[0029] Administration: As used herein, the term “administration” typically refers to administration of a composition to a subject or system to achieve delivery of an agent that is, or is included in, the composition.

[0030] Affinity: As used herein, “affinity” refers to the strength of the sum total of non-covalent interactions between a particular binding agent (e.g., a viral vector), and/or a binding moiety thereof, with a binding target (e.g., a cell). Unless indicated otherwise, as used herein, “binding affinity” refers to a 1:1 interaction between a binding agent and a binding target thereof (e.g., a viral vector with a target cell of the viral vector). Those of skill in the art appreciate that a change in affinity can be described by comparison to a reference (e.g., increased or decreased relative to a reference), or can be described numerically. Affinity can be measured and/or expressed in a number of ways known in the art, including, but not limited to, equilibrium dissociation constant (K_{D}) and/or equilibrium association constant (K_{A}). K_{D} is the quotient of k_{off}/kₒₙ, whereas K_{A} is the quotient of kₒₙ/k_{off}, where kₒₙ refers to the association rate constant of, e.g., viral vector with target cell, and k_{off} refers to the dissociation of, e.g., viral vector from target cell. The kₒₙ and k_{off} can be determined by techniques known to those of skill in the art.

[0031] Agent: As used herein, the term “agent” may refer to any chemical entity, including without limitation any of one or more of an atom, molecule, compound, amino acid, polypeptide, nucleotide, nucleic acid, protein, protein complex, liquid, solution, saccharide, polysaccharide, lipid, or combination or complex thereof.

[0032] Antibody: As used herein, the term “antibody” refers to a polypeptide that includes one or more canonical immunoglobulin sequence elements sufficient to confer specific binding to a particular antigen (e.g., a heavy chain variable domain, a light chain variable domain, and/or one or more CDRs). Thus, the term antibody includes, without limitation, human antibodies, non-human antibodies, synthetic and/or engineered antibodies, fragments thereof, and agents including the same. Antibodies can be naturally occurring immunoglobulins (e.g., generated by an organism reacting to an antigen). Synthetic, non-naturally occurring, or engineered antibodies can be produced by recombinant engineering, chemical synthesis, or other artificial systems or methodologies known to those of skill in the art.

[0033] As is well known in the art, immunoglobulins are approximately 150 kD tetrameric agents that include two identical heavy (H) chain polypeptides (about 50 kD each) and two identical light (L) chain polypeptides (about 25 kD each) that associate with each other to form a structure commonly referred to as a “Y-shaped” structure. Typically, each heavy chain includes a heavy chain variable domain (VH) and a heavy chain constant domain (CH). The heavy chain constant domain includes three CH domains: CH1, CH2 and CH3. A short region, known as the “switch”, connects the heavy chain variable and constant regions. The “hinge” connects CH2 and CH3 domains to the rest of the immunoglobulin. Each light chain includes a light chain variable domain (VL) and a light chain constant domain (CL), separated from one another by another “switch.” Each variable domain contains three hypervariable loops known as “complement determining regions” (CDR1, CDR2, and CDR3) and four somewhat invariant “framework” regions (FR1, FR2, FR3, and FR4). In each VH and VL, the three CDRs and four FRs are arranged from amino-terminus to carboxy-terminus in the following order: FR1, CDR1, FR2, CDR2, FR3, CDR3, and FR4. The variable regions of a heavy and/or a light chain are typically understood to provide a binding moiety that can interact with an antigen. Constant domains can mediate binding of an antibody to various immune system cells (e.g., effector cells and/or cells that mediate cytotoxicity), receptors, and elements of the complement system. Heavy and light chains can be linked to one another by a single disulfide bond, and two other disulfide bonds can connect the heavy chain hinge regions to one another, so that dimers are connected to one another and the tetramer is formed. When natural immunoglobulins fold, the FR regions form the beta sheets that provide the structural framework for the domains, and the CDR loop regions from both the heavy and light chains are brought together in three-dimensional space so that they create a single hypervariable antigen binding site located at the tip of the Y structure.

[0034] In some embodiments, an antibody is a polyclonal, monoclonal, monospecific, or multispecific antibody (e.g., a bispecific antibody). In some embodiments, an antibody includes at least one light chain monomer or dimer, at least one heavy chain monomer or dimer, at least one heavy chain-light chain dimer, or a tetramer that includes two heavy chain monomers and two light chain monomers. Moreover, the term “antibody” can include (unless otherwise stated or clear from context) any art-known constructs or formats utilizing antibody structural and/or functional features including without limitation intrabodies, domain antibodies, antibody mimetics, Zybodies®, Fab fragments, Fab′ fragments, F(ab′)2 fragments, Fd′ fragments, Fd fragments, isolated CDRs or sets thereof, single chain antibodies, single-chain Fvs (scFvs), disulfide-linked Fvs (sdFv), polypeptide-Fc fusions, single domain antibodies (e.g., shark single domain antibodies such as IgNAR or fragments thereof), cameloid antibodies, camelized antibodies, masked antibodies (e.g., Probodies®), affybodies, anti-idiotypic (anti-Id) antibodies (including, e.g., anti-anti-Id antibodies), Small Modular ImmunoPharmaceuticals (“SMIPs™”), single chain or Tandem diabodies (TandAb®), VHHs, Anticalins®, Nanobodies® minibodies, BiTE®s, ankyrin repeat proteins or DARPINs®, Avimers®, DARTs, TCR-like antibodies, Adnectins®, Affilins®, Trans-Bodies®, Affibodies®, TrimerX®, MicroProteins, Fynomers®, Centyrins®, and KALBITOR®s, CARs, engineered TCRs, and antigen-binding fragments of any of the above.

[0035] In various embodiments, an antibody includes one or more structural elements recognized by those skilled in the art as a complementarity determining region (CDR) or variable domain. In some embodiments, an antibody can be a covalently modified (“conjugated”) antibody (e.g., an antibody that includes a polypeptide including one or more canonical immunoglobulin sequence elements sufficient to confer specific binding to a particular antigen, where the polypeptide is covalently linked with one or more of a therapeutic agent, a detectable moiety, another polypeptide, a glycan, or a polyethylene glycol molecule). In some embodiments, antibody sequence elements are humanized, primatized, chimeric, etc., as is known in the art.

[0036] An antibody including a heavy chain constant domain can be, without limitation, an antibody of any known class, including but not limited to, IgA, secretory IgA, IgG, IgE and IgM, based on heavy chain constant domain amino acid sequence (e.g., alpha (α), delta (δ), epsilon (ε), gamma (γ) and mu (μ)). IgG subclasses are also well known to those in the art and include but are not limited to human IgG1, IgG2, IgG3 and IgG4. “Isotype” refers to the Ab class or subclass (e.g., IgM or IgG1) that is encoded by the heavy chain constant region genes. As used herein, a “light chain” can be of a distinct type, e.g., kappa (κ) or lambda (λ), based on the amino acid sequence of the light chain constant domain. In some embodiments, an antibody has constant region sequences that are characteristic of mouse, rabbit, primate, or human immunoglobulins. Naturally-produced immunoglobulins are glycosylated, typically on the CH2 domain. As is known in the art, affinity and/or other binding attributes of Fc regions for Fc receptors can be modulated through glycosylation or other modification. In some embodiments, an antibody may lack a covalent modification (e.g., attachment of a glycan) that it would have if produced naturally. In some embodiments, antibodies produced and/or utilized in accordance with the present invention include glycosylated Fc domains, including Fc domains with modified or engineered such glycosylation.

[0037] Between or From: As used herein, the term “between” refers to content that falls between indicated upper and lower, or first and second, boundaries, inclusive of the boundaries. Thus, for the avoidance of doubt, the term “between” includes values that are exactly the provided upper or lower, or first or second, bound, as well as all values within the provided range. Similarly, the term “from”, when used in the context of a range of values, indicates that the range includes content that falls between indicated upper and lower, or first and second, boundaries, inclusive of the boundaries.

[0038] Binding: As used herein, the term “binding” refers to a non-covalent association between or among two or more agents. “Direct” binding involves physical contact between agents; indirect binding involves physical interaction by way of physical contact with one or more intermediate agents. Binding between two or more agents can occur and/or be assessed in any of a variety of contexts, including where interacting agents are studied in isolation or in the context of more complex systems (e.g., while covalently or otherwise associated with a carrier agents and/or in a biological system or cell).

[0039] Cancer: As used herein, the term “cancer” refers to a condition, disorder, or disease in which cells exhibit relatively abnormal, uncontrolled, and/or autonomous growth, so that they display an abnormally elevated proliferation rate and/or aberrant growth phenotype characterized by a significant loss of control of cell proliferation. In some embodiments, a cancer can include one or more tumors. In some embodiments, a cancer can be or include cells that are precancerous (e.g., benign), malignant, pre-metastatic, metastatic, and/or non-metastatic. In some embodiments, a cancer can be or include a solid tumor. In some embodiments, a cancer can be or include a hematologic tumor.

[0040] Control expression or activity: As used herein, a first element (e.g., a protein, such as a transcription factor, or a nucleic acid sequence, such as promoter) “controls” or “drives” expression or activity of a second element (e.g., a protein or a nucleic acid encoding an agent such as a protein) if the expression or activity of the second element is wholly or partially dependent upon status (e.g., presence, absence, conformation, chemical modification, interaction, or other activity) of the first under at least one set of conditions. Control of expression or activity can be substantial control or activity, e.g., in that a change in status of the first element can, under at least one set of conditions, result in a change in expression or activity of the second element of at least 10% (e.g., at least 20%, 30%, 40%, 50%, 60%, 70%, 80%, 90%, 100%, 2-fold, 3-fold, 4-fold, 5-fold, 10-fold, 20-fold, 30-fold, 40-fold, 50-fold, 100-fold) as compared to a reference control.

[0041] Corresponding to: As used herein, the term “corresponding to” may be used to designate the position and/or identity of a structural element in a compound or composition through comparison with an appropriate reference compound or composition. For example, in some embodiments, a monomeric residue in a polymer (e.g., an amino acid residue in a polypeptide or a nucleic acid residue in a polynucleotide) may be identified as “corresponding to” a residue in an appropriate reference polymer. For example, those of skill in the art appreciate that residues in a provided polypeptide or polynucleotide sequence are often designated (e.g., numbered or labeled) according to the scheme of a related reference sequence (even if, e.g., such designation does not reflect literal numbering of the provided sequence). By way of illustration, if a reference sequence includes a particular amino acid motif at positions 100-110, and a second related sequence includes the same motif at positions 110-120, the motif positions of the second related sequence can be said to “correspond to” positions 100-110 of the reference sequence. Accordingly, a provided amino acid or nucleic acid sequence can have, for example, added, removed, inserted, or deleted positions or units that differ from a reference sequence but do not limit the designation of other positions or units as corresponding to the reference. In nucleic acid sequences, for example, exemplary additions or insertions can include restriction enzyme site nucleotides or recombinase site nucleotides. Those of skill in the art appreciate that corresponding positions can be readily identified, e.g., by alignment of sequences, and that such alignment is commonly accomplished by any of a variety of known tools, strategies, and/or algorithms, including without limitation software programs such as, for example, BLAST, CS-BLAST, CUDASW++, DIAMOND, FASTA, GGSEARCH/GLSEARCH, Genoogle, HMMER, HHpred/HHsearch, IDF, Infernal, KLAST, USEARCH, parasail, PSI-BLAST, PSI-Search, ScalaBLAST, Sequilab, SAM, SSEARCH, SWAPHI, SWAPHI-LS, SWIMM, or SWIPE. Two sequences can be identified as corresponding if they are identical or if they share substantial identity, e.g., at least 80%, 85%, 90%, 91%, 92%, 93%, 94%, 95%, 96%, 97%, 98%, or 99% identity. In various embodiments, a nucleic acid sequence can correspond to a sequence that is identical or substantially identical (e.g., at least 80%, 85%, 90%, 91%, 92%, 93%, 94%, 95%, 96%, 97%, 98%, or 99% identical) to the complement of the nucleic acid sequence.

[0042] Downstream and Upstream: As used herein, the term “downstream” means that a first DNA region is closer, relative to a second DNA region, to the C-terminus of a nucleic acid that includes the first DNA region and the second DNA region. As used herein, the term “upstream” means a first DNA region is closer, relative to a second DNA region, to the N-terminus of a nucleic acid that includes the first DNA region and the second DNA region.

[0043] Effective amount: An “effective amount” is the amount of a composition (e.g., a formulation) necessary to result in a desired physiological change in a subject. Effective amounts are often administered for research purposes.

[0044] Engineered: As used herein, the terms “engineered” and “recombinant” are used interchangeably herein to refer to compositions having been manipulated by the hand of man. For example, a polynucleotide is considered to be “engineered” when two or more sequences, that are not linked together in that order in nature, are manipulated by the hand of man to be directly linked to one another in the engineered polynucleotide. Those of skill in the art will appreciate that an “engineered” nucleic acid or amino acid sequence can be a recombinant nucleic acid or amino acid sequence, and can be referred to as “genetically engineered.” In some embodiments, an engineered polynucleotide includes a coding sequence and/or a regulatory sequence that is found in nature operably linked with a first sequence but is not found in nature operably linked with a second sequence, which is in the engineered polynucleotide operably linked in with the second sequence by the hand of man. In some embodiments, a cell or organism is considered to be “engineered” or “genetically engineered” if it has been manipulated so that its genetic information is altered (e.g., new genetic material not previously present has been introduced, for example by transformation, mating, somatic hybridization, transfection, transduction, or other mechanism, or previously present genetic material is altered or removed, for example by substitution, deletion, or mating). As is common practice and is understood by those of skill in the art, progeny or copies, perfect or imperfect, of an engineered polynucleotide or cell are typically still referred to as “engineered” even though the direct manipulation was of a prior entity.

[0045] Expression: As used herein, “expression” refers individually and/or cumulatively to one or more biological process that result in production from a nucleic acid sequence of an encoded agent, such as a protein. Expression specifically includes either or both of transcription and translation.

[0046] Flank: As used herein, a first element (e.g., a nucleic acid sequence or amino acid sequence) present in a contiguous sequence with a second element and a third element is “flanked” by the second element and third element if it is positioned in the contiguous sequence between the second element and the third element. Accordingly, in such arrangement, the second element and third element can be referred to as “flanking” the first element. Flanking elements can be immediately adjacent to a flanked element or separated from the flanked element by one or more relevant units. In various examples in which the contiguous sequence is a nucleic acid or amino acid sequence, and the relevant units are bases or amino acid residues, respectively, the number of units in the contiguous sequence that are between a flanked element and, independently, first and/or second flanking elements can be, e.g., 50 units or less, e.g., no more than 50, 45, 40, 35, 30, 25, 20, 15, 10, 5, 4, 3, 2, 1, or 0 units.

[0047] Fragment: As used herein, “fragment” refers a structure that includes and/or consists of a discrete portion of a reference agent (sometimes referred to as the “parent” agent). In some embodiments, a fragment lacks one or more moieties found in the reference agent. In some embodiments, a fragment includes or consists of one or more moieties found in the reference agent. In some embodiments, the reference agent is a polymer such as a polynucleotide or polypeptide. In some embodiments, a fragment of a polymer includes or consists of at least 3, 4, 5, 6, 7, 8, 9, 10, 11, 12, 13, 14, 15, 16, 17, 18, 19, 20, 25, 30, 35, 40, 45, 50, 55, 60, 65, 70, 75, 80, 85, 90, 95, 100, 110, 120, 130, 140, 150, 160, 170, 180, 190, 200, 210, 220, 230, 240, 250, 275, 300, 325, 350, 375, 400, 425, 450, 475, 500 or more monomeric units (e.g., residues) of the reference polymer. In some embodiments, a fragment is a sequence having a number of units having a lower bound selected from 3, 4, 5, 6, 7, 8, 9, 10, 11, 12, 13, 14, 15, 16, 17, 18, 19, 20, 25, 30, 35, 40, 45, 50, 55, 60, 65, 70, 75, 80, 85, 90, 95, 100, 110, 120, 130, 140, 150, 160, 170, 180, 190, 200, 210, 220, 230, 240, 250, 275, 300 monomeric units and an upper bound selected from 50, 55, 60, 65, 70, 75, 80, 85, 90, 95, 100, 110, 120, 130, 140, 150, 160, 170, 180, 190, 200, 210, 220, 230, 240, 250, 275, 300, 325, 350, 375, 400, 425, 450, 475, 500 or more monomeric units. In some embodiments, a fragment of a polymer includes or consists of at least 5%, 10%, 15%, 20%, 25%, 30%, 25%, 40%, 45%, 50%, 55%, 60%, 65%, 70%, 75%, 80%, 85%, 90%, 95%, 96%, 97%, 98%, 99% or more of the monomeric units (e.g., residues) found in the reference polymer. A fragment of a reference polymer is not necessarily identical to a corresponding portion of the reference polymer. For example, a fragment of a reference polymer can be a polymer having a sequence of residues having at least 5%, 10%, 15%, 20%, 25%, 30%, 25%, 40%, 45%, 50%, 55%, 60%, 65%, 70%, 75%, 80%, 85%, 90%, 95%, 96%, 97%, 98%, 99% or more identity to the reference polymer. A fragment may, or may not, be generated by physical fragmentation of a reference agent. In some instances, a fragment is generated by physical fragmentation of a reference agent. In some instances, a fragment is not generated by physical fragmentation of a reference agent and can be instead, for example, produced by de novo synthesis or other means.

[0048] Gene, Transgene: As used herein, the term “gene” refers to a DNA sequence that is or includes coding sequence (i.e., a DNA sequence that encodes an expression product, such as an RNA product and/or a polypeptide product), optionally together with some or all of regulatory sequences that control expression of the coding sequence. In some embodiments, a gene includes non-coding sequence such as, without limitation, introns. In some embodiments, a gene may include both coding (e.g., exonic) and non-coding (e.g., intronic) sequences. In some embodiments, a gene includes a regulatory sequence that is a promoter. In some embodiments, a gene includes one or both of a (i) DNA nucleotides extending a predetermined number of nucleotides upstream of the coding sequence in a reference context, such as a source genome, and (ii) DNA nucleotides extending a predetermined number of nucleotides downstream of the coding sequence in a reference context, such as a source genome. In various embodiments, the predetermined number of nucleotides can be 500 bp, 1 kb, 2 kb, 3 kb, 4 kb, 5 kb, 10 kb, 20 kb, 30 kb, 40 kb, 50 kb, 75 kb, or 100 kb. As used herein, a “transgene” refers to a gene that is not endogenous or native to a reference context in which the gene is present or into which the gene may be placed by engineering.

[0049] Gene product or expression product: As used herein, the term “gene product” or “expression product” generally refers to an RNA transcribed from the gene (pre- and/or post-processing) or a polypeptide (pre- and/or post-modification) encoded by an RNA transcribed from the gene.

[0050] Host cell, target cell: As used herein, “host cell” refers to a cell into which exogenous DNA (recombinant or otherwise), such as a transgene, has been introduced. Those of skill in the art appreciate that a “host cell” can be the cell into which the exogenous DNA was initially introduced and/or progeny or copies, perfect or imperfect, thereof. In some embodiments, a host cell includes one or more viral genes or transgenes. In some embodiments, a host cell is a cell that has been entered by a viral vector, e.g., a vector of the present disclosure or a viral genome thereof, e.g., a viral genome disclosed herein. In some embodiments, an intended or potential host cell can be referred to as a target cell.

[0051] In various embodiments, a host cell or target cell is identified by the presence, absence, or expression level of various surface markers.

[0052] A statement that a cell or population of cells is “positive” for or expressing a particular marker refers to the detectable presence on or in the cell of the particular marker. When referring to a surface marker, the term can refer to the presence of surface expression as detected by flow cytometry, for example, by staining with an antibody that specifically binds to the marker and detecting said antibody, where the staining is detectable by flow cytometry at a level substantially above the staining detected carrying out the same procedure with an isotype-matched control under otherwise identical conditions and/or at a level substantially similar to that for cell known to be positive for the marker, and/or at a level substantially higher than that for a cell known to be negative for the marker.

[0053] A statement that a cell or population of cells is “negative” for a particular marker or lacks expression of a marker refers to the absence of substantial detectable presence on or in the cell of a particular marker. When referring to a surface marker, the term can refer to the absence of surface expression as detected by flow cytometry, for example, by staining with an antibody that specifically binds to the marker and detecting said antibody, where the staining is not detected by flow cytometry at a level substantially above the staining detected carrying out the same procedure with an isotype-matched control under otherwise identical conditions, and/or at a level substantially lower than that for cell known to be positive for the marker, and/or at a level substantially similar as compared to that for a cell known to be negative for the marker.

[0054] Identity: As used herein, the term “identity” refers to the overall relatedness between polymeric molecules, e.g., between nucleic acid molecules (e.g., DNA molecules and/or RNA molecules) and/or between polypeptide molecules. Methods for the calculation of a percent identity as between two provided sequences are known in the art. The term “% sequence identity” refers to a relationship between two or more sequences, as determined by comparing the sequences. In the art, “identity” also means the degree of sequence relatedness between protein and nucleic acid sequences as determined by the match between strings of such sequences. “Identity” (often referred to as “similarity”) can be readily calculated by known methods, including those described in: Computational Molecular Biology (Lesk, A. M., ed.) Oxford University Press, NY (1988); Biocomputing: Informatics and Genome Projects (Smith, D. W., ed.) Academic Press, NY (1994); Computer Analysis of Sequence Data, Part I (Griffin, A. M., and Griffin, H. G., eds.) Humana Press, NJ (1994); Sequence Analysis in Molecular Biology (Von Heijne, G., ed.) Academic Press (1987); and Sequence Analysis Primer (Gribskov, M. and Devereux, J., eds.) Oxford University Press, NY (1992). Preferred methods to determine identity are designed to give the best match between the sequences tested. Methods to determine identity and similarity are codified in publicly available computer programs. For instance, calculation of the percent identity of two nucleic acid or polypeptide sequences, for example, can be performed by aligning the two sequences (or the complement of one or both sequences) for optimal comparison purposes (e.g., gaps can be introduced in one or both of a first and a second sequences for optimal alignment and non-identical sequences can be disregarded for comparison purposes). The nucleotides or amino acids at corresponding positions are then compared. When a position in the first sequence is occupied by the same residue (e.g., nucleotide or amino acid) as the corresponding position in the second sequence, then the molecules are identical at that position. The percent identity between the two sequences is a function of the number of identical positions shared by the sequences, optionally accounting for the number of gaps, and the length of each gap, which may need to be introduced for optimal alignment of the two sequences. The comparison of sequences and determination of percent identity between two sequences can be accomplished using a computational algorithm, such as BLAST (basic local alignment search tool). Sequence alignments and percent identity calculations may be performed using the Megalign program of the LASERGENE bioinformatics computing suite (DNASTAR, Inc., Madison, Wisconsin). Multiple alignment of the sequences can also be performed using the Clustal method of alignment (Higgins and Sharp CABIOS, 5, 151-153 (1989) with default parameters (GAP PENALTY=10, GAP LENGTH PENALTY=10). Relevant programs also include the GCG suite of programs (Wisconsin Package Version 9.0, Genetics Computer Group (GCG), Madison, Wisconsin); BLASTP, BLASTN, BLASTX (Altschul et al., J. Mol. Biol. 215:403-410 (1990); DNASTAR (DNASTAR, Inc., Madison, Wisconsin); and the FASTA program incorporating the Smith-Waterman algorithm (Pearson, Comput. Methods Genome Res., [Proc. Int. Symp.] (1994), Meeting Date 1992, 111-20. Editor(s): Suhai, Sandor. Publisher: Plenum, New York, N.Y. Within the context of this disclosure, it will be understood that where sequence analysis software is used for analysis, the results of the analysis are based on the “default values” of the program referenced. “Default values” will mean any set of values or parameters, which originally load with the software when first initialized.

[0055] “Improve,” “increase,” “inhibit,” or “reduce”: As used herein, the terms “improve”, “increase”, “inhibit”, and “reduce”, and grammatical equivalents thereof, indicate qualitative or quantitative difference from a reference.

[0056] Isolated: As used herein, “isolated” refers to a substance and/or entity that has been (1) separated from at least some of the components with which it was associated when initially produced (whether in nature and/or in an experimental setting), and/or (2) designed, produced, prepared, and/or manufactured by the hand of man. Isolated substances and/or entities may be separated from 10%, 20%, 30%, 40%, 50%, 60%, 70%, 80%, 90%, 91%, 92%, 93%, 94%, 95%, 96%, 97%, 98%, 99%, or more than 99% of the other components with which they were initially associated. In some embodiments, isolated agents are 80%, 85%, 90%, 91%, 92%, 93%, 94%, 95%, 96%, 97%, 98%, 99%, or more than 99% pure. As used herein, a substance is “pure” if it is substantially free of other components. In some embodiments, as will be understood by those skilled in the art, a substance may still be considered “isolated” or even “pure”, after having been combined with certain other components such as, for example, one or more carriers or excipients (e.g., buffer, solvent, water, etc.); in such embodiments, percent isolation or purity of the substance is calculated without including such carriers or excipients. To give but one example, in some embodiments, a biological polymer such as a polypeptide or polynucleotide that occurs in nature is considered to be “isolated” when, a) by virtue of its origin or source of derivation is not associated with some or all of the components that accompany it in its native state in nature; b) it is substantially free of other polypeptides or nucleic acids of the same species from the species that produces it in nature; c) is expressed by or is otherwise in association with components from a cell or other expression system that is not of the species that produces it in nature. Thus, for instance, in some embodiments, a polypeptide that is chemically synthesized or is synthesized in a cellular system different from that which produces it in nature is considered to be an “isolated” polypeptide. Alternatively or additionally, in some embodiments, a polypeptide that has been subjected to one or more purification techniques may be considered to be an “isolated” polypeptide to the extent that it has been separated from other components a) with which it is associated in nature; and/or b) with which it was associated when initially produced.

[0057] Operably linked: As used herein, “operably linked” or “operatively linked” refers to the association of at least a first element and a second element such that the component elements are in a relationship permitting them to function in their intended manner. For example, a nucleic acid regulatory sequence is “operably linked” to a nucleic acid coding sequence if the regulatory sequence and coding sequence are associated in a manner that permits control of expression of the coding sequence by the regulatory sequence. In some embodiments, an “operably linked” regulatory sequence is directly or indirectly covalently associated with a coding sequence (e.g., in a single nucleic acid). In some embodiments, a regulatory sequence controls expression of a coding sequence in trans and inclusion of the regulatory sequence in the same nucleic acid as the coding sequence is not a requirement of operable linkage.

[0058] Promoter: As used herein, a “promoter” or “promoter sequence” can be a DNA regulatory region that directly or indirectly (e.g., through promoter-bound proteins or substances) participates in initiation and/or processivity of transcription of a coding sequence. A promoter may, under suitable conditions, initiate transcription of a coding sequence upon binding of one or more transcription factors and/or regulatory moieties with the promoter. A promoter that participates in initiation of transcription of a coding sequence can be “operably linked” to the coding sequence. In certain instances, a promoter can be or include a DNA regulatory region that extends from a transcription initiation site (at its 3′ terminus) to an upstream (5′ direction) position such that the sequence so designated includes one or both of a minimum number of bases or elements necessary to initiate a transcription event. A promoter may be, include, or be operably associated with or operably linked to, expression control sequences such as enhancer and repressor sequences. In some embodiments, a promoter may be inducible. In some embodiments, a promoter may be a constitutive promoter. In some embodiments, a conditional (e.g., inducible) promoter may be unidirectional or bi-directional. A promoter may be or include a sequence identical to a sequence known to occur in the genome of particular species. In some embodiments, a promoter can be or include a hybrid promoter, in which a sequence containing a transcriptional regulatory region can be obtained from one source and a sequence containing a transcription initiation region can be obtained from a second source. Systems for linking control elements to coding sequence within a transgene are well known in the art (general molecular biological and recombinant DNA techniques are described in Sambrook, Fritsch, and Maniatis, Molecular Cloning: A Laboratory Manual, Second Edition, Cold Spring Harbor Laboratory Press, Cold Spring Harbor, NY, 1989).

[0059] Reference: As used herein, “reference” refers to a standard or control relative to which a comparison is performed. For example, in some embodiments, an agent, sample, sequence, subject, animal, or individual, or population thereof, or a measure or characteristic representative thereof, is compared with a reference, an agent, sample, sequence, subject, animal, or individual, or population thereof, or a measure or characteristic representative thereof. In some embodiments, a reference is a measured value. In some embodiments, a reference is an established standard or expected value. In some embodiments, a reference is a historical reference. A reference can be quantitative of qualitative. Typically, as would be understood by those of skill in the art, a reference and the value to which it is compared represent comparable conditions. Those of skill in the art will appreciate when sufficient similarities are present to justify reliance on and/or comparison. In some embodiments, an appropriate reference may be an agent, sample, sequence, subject, animal, or individual, or population thereof, under conditions those of skill in the art will recognize as comparable, e.g., for the purpose of assessing one or more particular variables (e.g., presence or absence of an agent or condition), or a measure or characteristic representative thereof. Without wishing to be bound by any particular embodiment(s), in various embodiments a reference sequence can be a sequence associated with a sequence accession number provided herein, certain of which sequences associated with sequence accession numbers are provided in the below listing of accession sequences.

[0060] Regulatory sequence: As used herein in the context of expression of a nucleic acid coding sequence, a regulatory sequence is a nucleic acid sequence that controls expression of a coding sequence. In some embodiments, a regulatory sequence can control or impact one or more aspects of gene expression (e.g., cell-type-specific expression, inducible expression, etc.).

[0061] Subject: As used herein, the term “subject” refers to an organism, typically a mammal (e.g., a human, rat, or mouse). In some embodiments, a subject is suffering from a disease, disorder or condition. In some embodiments, a subject is susceptible to a disease, disorder, or condition. In some embodiments, a subject displays one or more symptoms or characteristics of a disease, disorder or condition. In some embodiments, a subject is not suffering from a disease, disorder or condition. In some embodiments, a subject does not display any symptom or characteristic of a disease, disorder, or condition. In some embodiments, a subject has one or more features characteristic of susceptibility to or risk of a disease, disorder, or condition. In some embodiments, a subject is a subject that has been tested for a disease, disorder, or condition, and/or to whom therapy has been administered. In some instances, a subject to which an agent is administered can be interchangeably referred to as a “recipient.” In some instances, a human subject can be interchangeably referred to as a “patient” or “individual.”

[0062] Treatment: As used herein, the term “treatment” (also “treat” or “treating”) refers to administration of a therapy that partially or completely alleviates, ameliorates, relieves, inhibits, delays onset of, reduces severity of, and/or reduces incidence of one or more symptoms, features, and/or causes of a particular disease, disorder, or condition, or is administered for the purpose of achieving any such result. In some embodiments, such treatment can be of a subject who does not exhibit signs of the relevant disease, disorder, or condition and/or of a subject who exhibits only early signs of the disease, disorder, or condition. Alternatively or additionally, such treatment can be of a subject who exhibits one or more established signs of the relevant disease, disorder and/or condition. In some embodiments, treatment can be of a subject who has been diagnosed as suffering from the relevant disease, disorder, and/or condition. In some embodiments, treatment can be of a subject known to have one or more susceptibility factors that are statistically correlated with increased risk of development of the relevant disease, disorder, or condition. A “prophylactic treatment” includes a treatment administered to a subject who does not display signs or symptoms of a condition to be treated or displays only early signs or symptoms of the condition to be treated such that treatment is administered for the purpose of diminishing, preventing, or decreasing the risk of developing the condition. Thus, a prophylactic treatment functions as a preventative treatment against a condition. A “therapeutic treatment” includes a treatment administered to a subject who displays symptoms or signs of a condition and is administered to the subject for the purpose of reducing the severity or progression of the condition.

### BRIEF DESCRIPTION OF THE DRAWINGS

[0063] FIG. 1A is a schematic showing alignment of the ‘left end’ sequences of wild type sequences of Ad3 (NCBI accession no. NC_011203) and Ad35 (GenBank accession no. AY128640) (the ‘left end’ being defined by the conventional representation of adenoviral maps, where the major late promoter transcribes the ‘top strand’). Alignment was used to identify putative packaging signals of Ad35 (boxed). Packaging signals A1, A2, A5, and A6 were identified in accordance with terminology set forth in Ostapchuk and Hearing, J Virol. 2001 75:45-51. The table shown in FIG. 1A provides four exemplary positions for placement of a 5′ loxP site, three exemplary positions for placement of a 3′ loxP site, and four exemplary pairings of a position for placement of a 5′ loxP site and a position for placement of a 3′ loxP site. LoxP sites were inserted in the Ad35 genome to the left of the packaging signal A1 at one of four positions indicated by black arrowheads (i.e., after nucleotide numbers 161, 171, 195, or 224) in combination with a loxP sequence inserted to the right of the packaging signal A6, e.g., at positions indicated by open arrowheads (shown after nucleotide numbers 402 or 479). A loxP sequence can also be inserted at a third position (after nucleotide number 497) to the right of the packaging signal A6. The exemplified combinations are further described in Example 1. Because adenoviral sequences of Example 1 were deleted between base pairs 480, 481, or 482 to 3199 to derive E1-deleted replication incompetent vectors, insertion of a loxP sequence after nucleotide 497 can also be described as an insertion at position 3200, which due to the E1 deletion is not as distant from the other insertions as the number would suggest.

[0064] FIG. 1B is a schematic showing alignment of the ‘left end’ sequences of wild type sequences of Ad35 (NCBI accession no. AC_000019), Ad3 (NCBI accession no. NC_011203), Ad7 (GenBank accession no. AY601634), Ad11 (NCBI accession no. NC_011202), Ad14 (GenBank accession no. AY803294), Ad16 (GenBank accession no. AY601636), Ad21 (GenBank accession no. AY601633), Ad34 (GenBank accession no. AY737797), and Ad50 (GenBank accession no. AY737798) (the ‘left end’ being defined by the conventional representation of adenoviral maps, where the major late promoter transcribes the ‘top strand’). Highlighted nucleotides are identical to the corresponding aligned nucleotide in Ad35. Alignment was used to identify putative packaging signals of Ad3, Ad7, Ad11, Ad14, Ad16, Ad21, Ad34, and Ad50 (boxed). Packaging signals A1, A2, A5, and A6 were identified in accordance with terminology set forth in Ostapchuk and Hearing, J Virol. 75(1):45-51 (2001). The arrows indicate four exemplary positions for placement of a 5′ recombinase direct repeat (e.g., a loxP site) and two exemplary positions for placement of a 3′ recombinase direct repeat (e.g., a loxP site). Recombinase direct repeats can be inserted in an Ad3, Ad7, Ad11, Ad14, Ad16, Ad21, Ad34, or Ad50 genome at one of four positions indicated by arrows labelled L1, L2, L3 or L4 in combination with a recombinase direct repeat inserted to the right of the packaging signal A6, e.g., at positions indicated by arrows labelled R1 or R2. A loxP sequence can also be inserted at a third position, denoted as R3, to the right of the packaging signal A6. Particular exemplary combinations of recombinase direct repeat positions are further described in Example 1.

[0065] FIG. 2A is a schematic showing the ‘left end’ sequence of an Ad35 helper genome which corresponds to that shown in FIG. 1A (see also GenBank accession number AY128640) and includes (i) six nucleotides added to produce an FseI restriction site between Ad35 positions 143 and 144, (ii) loxP sites added after positions 224 and 402, and (iii) I-SceI and FseI sites added after position 480. Certain added sequences are shown within boxes.

[0066] FIG. 2B is a schematic showing the ‘left end’ sequence of an Ad35 helper genome which corresponds to that shown in FIG. 1A (see also GenBank accession number AY128640) and includes (i) six nucleotides added to produce an FseI restriction site between Ad35 positions 143 and 144, (ii) loxP sites added after positions 171 and 402, and (iii) I-SceI and FseI sites added after position 480. Certain added sequences are shown within boxes.

[0067] FIG. 2C is a schematic showing the ‘left end’ sequence of an Ad35 helper genome which corresponds to that shown in FIG. 1A (see also GenBank accession number AY128640) and includes (i) six nucleotides added to produce an FseI restriction site between Ad35 positions 143 and 144, (ii) loxP sites added after positions 195 and 479, and (iii) I-SceI and FseI sites added after position 480. Certain added sequences are shown within boxes.

[0068] FIG. 2D is a schematic showing the ‘left end’ sequence of an Ad35 helper genome which corresponds to that shown in FIG. 1A (see also GenBank accession number AY128640) and includes (i) six nucleotides added to produce a first FseI restriction site between Ad35 positions corresponding to 143 and 144, (ii) loxP sites added after positions corresponding to 161 and 497, (iii) an I-SceI site inserted in place of the canonical sequence at positions corresponding to 481-497, and (iv) a second FseI site added after the position corresponding to 497. Certain added sequences are shown within boxes. The loxP site added after the position corresponding to 497 can alternatively be described as being added at position 3200 in a construct that includes a deletion of nucleotide positions 481 or 482 to 3199, and insertion of the I-SceI and second FseI sites after the position corresponding to 480 (accordingly, this loxP site can further alternatively be described as being added together with the I-SceI and second FseI sites after the position corresponding to 480).

[0069] FIG. 2E is a schematic showing the ‘left end’ sequence of an Ad35 helper genome which corresponds to that shown in FIG. 1A (see also GenBank accession number AY128640) and includes sequences added after positions corresponding to 206 and 484 to introduce SwaI restriction sites and loxP sites. Certain added sequences are shown within boxes. pEN024 is a plasmid encoding a helper vector genome that includes the construct of this figure. As noted elsewhere herein, and as applicable throughout, where an inserted sequence (such as a loxP site, to provide one non-limiting example) includes terminal nucleotide positions identical in sequence with reference nucleotides that could be construed as displaced by the insertion, the site of the insertion can be represented, e.g., as occurring after any of such terminal nucleotide positions, or after the last nucleotide that does not correspond to the inserted sequence of interest. Thus, for example, the defining loxP insertion positions of pEN024 could alternative be identified, e.g., as after positions corresponding to 206 and 481.

[0070] FIG. 3 is an image of a gel showing digestion of Ad35 helper genomes and plasmids including Ad35 helper genomes, together with a table describing the gel. Lanes 1, 3, 6, and 8 of the gel show BsrGI digestion of helper virus genomes produced using pEN025, pEN026, pEN027, and pEN028, respectively, while lanes 2, 4, 7, and 9 of the gel show digestion of the respective starting plasmids with BsrGI and SwaI. Lane 5 includes a 1 Kb Plus ladder. The accompanying table included in the figure shows that pEN025, pEN026, pEN027, and pEN028 each include a conditional packaging sequence according to the present disclosure, in particular one of the 4 constructs described as Constructs 1˜4 in Example 1 (i.e., pEN025 corresponds to Construct 1 and FIG. 2A, pEN026 corresponds to Construct 2 and FIG. 2B, pEN027 corresponds to Construct 3 and FIG. 2C, and pEN028 corresponds to Construct 4 and FIG. 2D), respectively. Expected band sizes were obtained in all lanes.

[0071] FIG. 4 is an image of a gel showing digestion of Ad35 helper genomes, together with a table describing the gel. The accompanying table included in the figure shows the plasmid and cell type used in producing the sample shown in each lane, as well as the expected band size. ApaI digestion produces a 2014 bp fragment from packaging-competent Ad35 genomes (flanked packaging sequence not excised), and a smaller fragment from Ad35 genomes from which a flanked packaging sequence has been excised. Lane 1 includes a 1 Kb Plus ladder. All band sizes were consistent with expectations.

[0072] FIG. 5 is a plasmid map depicting the structural organization of plasmid 5427, a plasmid that encodes a helper-dependent genome that includes terminal sequences derived from Ad35. The encoded helper-dependent genome includes a cassette for expression of beta-galactosidase. Digestion of plasmid 5427 with the restriction enzyme PmeI releases the helper-dependent genome from the plasmid backbone. At least because the 5′ and 3′ ends of plasmid 5427 include sequences derived from Ad35, the encoded helper-dependent genome can be packaged into vector particles produced using Ad35 helper genomes of the present disclosure.

[0073] FIG. 6A is a pair of images showing cesium chloride gradient purification of helper-dependent adenovirus produced using an Ad35 helper genome according to the present disclosure. Images represent two successive rounds of purification. The HDAd preparation subjected to the cesium chloride gradient purification was produced by transfecting 116 cells with a plasmid including an Ad35 helper genome according to the present disclosure (pEN025) and a plasmid including a helper-dependent genome that includes terminal sequences derived from Ad35 (plasmid 5427).

[0074] FIG. 6B is a pair of images showing cesium chloride gradient purification of helper-dependent adenovirus produced using an Ad35 helper genome according to the present disclosure. Images represent two successive rounds of purification. The HDAd preparation subjected to the cesium chloride gradient purification was produced by transfecting 116 cells with a plasmid including an Ad35 helper genome according to the present disclosure (pEN026) and a plasmid including a helper-dependent genome that includes terminal sequences derived from Ad35 (plasmid 5427).

[0075] FIG. 6C is a pair of images showing cesium chloride gradient purification of helper-dependent adenovirus produced using an Ad35 helper genome according to the present disclosure. Images represent two successive rounds of purification. The HDAd preparation subjected to the cesium chloride gradient purification was produced by transfecting 116 cells with a plasmid including an Ad35 helper genome according to the present disclosure (pEN027) and a plasmid including a helper-dependent genome that includes terminal sequences derived from Ad35 (plasmid 5427).

[0076] FIG. 6D is a pair of images showing cesium chloride gradient purification of helper-dependent adenovirus produced using an Ad35 helper genome according to the present disclosure. Images represent two successive rounds of purification. The HDAd preparation subjected to the cesium chloride gradient purification was produced by transfecting 116 cells with a plasmid including an Ad35 helper genome according to the present disclosure (pEN028) and a plasmid including a helper-dependent genome that includes terminal sequences derived from Ad35 (plasmid 5427).

[0077] FIG. 6E is a pair of images showing cesium chloride gradient purification of helper-dependent adenovirus produced using an Ad35 helper genome according to the present disclosure. Images represent two successive rounds of purification. The HDAd preparation subjected to the cesium chloride gradient purification was produced by transfecting 116 cells with a plasmid including an Ad35 helper genome according to the present disclosure (pEN024) and a plasmid including a helper-dependent genome that includes terminal sequences derived from Ad35 (plasmid 5427).

[0078] FIG. 7A is an image of a gel, together with a table describing the gel. The gel shows digestion of adenoviral genomes obtained from 116 cells transfected with a plasmid including an Ad35 helper genome according to the present disclosure (pEN025 or pEN026) and plasmid 5427, then purified by two successive rounds of cesium chloride gradient purification. As indicated in the table included in the figure, the purified adenoviral genomes were digested with SacII (lanes 4 and 6), while parental plasmids were also digested for comparison (lanes 2, 3, and 5). In lane 2, plasmid 5427 was digested with PmeI (releases the helper-dependent genome from the plasmid 5427 backbone) and SacII. In lanes 3 and 5, helper plasmids pEN025 and pEN026 were digested with SwaI (releases helper genome from the plasmid backbone of pEN025 and pEN026) and SacII.

[0079] FIG. 7B is an image of a gel, together with a table describing the gel. The gel shows digestion of adenoviral genomes obtained from 116 cells transfected with a plasmid including an Ad35 helper genome according to the present disclosure (pEN027 or pEN028) and plasmid 5427, then purified by two successive rounds of cesium chloride gradient purification. As indicated in the table included in the figure, the purified adenoviral genomes were digested with SacII (lanes 4 and 6), while parental plasmids were also digested for comparison (lanes 2, 3, and 5). In lane 2, plasmid 5427 was digested with PmeI (releases the helper-dependent genome from the plasmid 5427 backbone) and SacII. In lanes 3 and 5, helper plasmids pEN027 and pEN028 were digested with SwaI (releases helper genome from the plasmid backbone of pEN027 and pEN028) and SacII.

[0080] FIG. 7C is an image of a gel, together with a table describing the gel. The gel shows digestion of adenoviral genomes obtained from 116 cells transfected with a plasmid including an Ad35 helper genome according to the present disclosure (pEN024) and plasmid 5427, then purified by two successive rounds of cesium chloride gradient purification. As indicated in the table included in the figure, the purified adenoviral genomes were digested with SacII (lane 4), while parental plasmids were also digested for comparison (lanes 2 and 3). In lane 3, plasmid 5427 was digested with PmeI (releases the helper-dependent genome from the plasmid 5427 backbone) and SacII. In lane 2, helper plasmids pEN024 was digested with PmeI (releases helper genome from the plasmid backbone of pEN024) and SacII.

[0081] FIG. 8A is a schematic showing homologous recombination between an Ad35 helper genome (Helper Ad) and a helper-dependent Ad35 genome (HDAd) that results in elimination of one of the recombinase sites that flank a packaging sequence.

[0082] FIG. 8B is a schematic showing an Ad35 helper genome (Helper Ad) that includes a packaging sequence inversion. Packaging sequence inversion reduces and/or eliminate recombinase site-excising homologous recombination, and thereby prevents production of a constitutively packageable helper genome.

[0083] FIG. 9A is a schematic showing the ‘left end’ sequence of an Ad35 helper genome that includes a packaging sequence inversion. The sequence shown in FIG. 9A corresponds to the sequence of FIG. 2A and includes an inversion of nucleotides positioned between FseI sites of FIG. 2A.

[0084] FIG. 9B is a schematic showing the ‘left end’ sequence of an Ad35 helper genome that includes a packaging sequence inversion. The sequence shown in FIG. 9A corresponds to the sequence of FIG. 2B and includes an inversion of nucleotides positioned between FseI sites of FIG. 2B.

[0085] FIG. 9C is a schematic showing the ‘left end’ sequence of an Ad35 helper genome that includes a packaging sequence inversion. The sequence shown in FIG. 9C corresponds to the sequence of FIG. 2C and includes an inversion of nucleotides positioned between FseI sites of FIG. 2C.

[0086] FIG. 9D is a schematic showing the ‘left end’ sequence of an Ad35 helper genome that includes a packaging sequence inversion. The sequence shown in FIG. 9D corresponds to the sequence of FIG. 2D and includes an inversion of nucleotides positioned between FseI sites of FIG. 2D.

[0087] FIG. 10 is an image of a gel showing digestion of Ad35 helper genomes and plasmids including Ad35 helper genomes, together with a table describing the gel. Lanes 2 and 4 of the gel show XmnI digestion of helper virus genomes produced using pEN0056 and pEN0057, respectively, while lanes 1 and 3 of the gel show digestion of the respective starting plasmid with XmnI and SwaI. Lane 5 includes a 1 Kb Plus ladder. The accompanying table included in the figure shows that pEN0056 and pEN0057 each include an inverted conditional packaging sequence according to the present disclosure, in particular one of the constructs described as Constructs 7 and 8 in Example 5, respectively (i.e., pEN0056 corresponds to a plasmid including Construct 7 and pEN0057 corresponds to a plasmid including Construct 8). Expected band sizes were obtained in all lanes.

[0088] FIG. 11 is an image of a gel showing digestion of Ad35 helper genomes, together with a table describing the gel. The accompanying table included in the figure shows the plasmid and cell type used in producing the sample shown in each lane, as well as the expected band size. ApaI digestion produces a 2013 bp fragment from packaging-competent Ad35 genomes (inverted flanked packaging sequence not excised), and a smaller fragment from Ad35 genomes from which an inverted flanked packaging sequence has been excised. Lane 1 includes a 1 Kb Plus ladder. All band sizes were consistent with expectations.

[0089] FIG. 12 is a plasmid map depicting the structural organization of plasmid 5475, a plasmid that encodes a helper-dependent genome that includes terminal sequences derived from Ad35. The encoded helper-dependent genome includes a cassette for expression of beta-galactosidase. Digestion of plasmid 5475 with the restriction enzyme PmeI releases the helper-dependent genome from the plasmid backbone. At least because the 5′ and 3′ ends of plasmid 5475 include sequences derived from Ad35, the encoded helper-dependent genome can be packaged into vector particles produced using Ad35 helper genomes of the present disclosure.

[0090] FIG. 13A is a pair of images showing cesium chloride gradient purification of helper-dependent adenovirus produced using an Ad35 helper genome according to the present disclosure. Images represent two successive rounds of purification. The HDAd preparation subjected to the cesium chloride gradient purification was produced by transfecting 116 cells with a plasmid including an Ad35 helper genome according to the present disclosure (pEN0056) and a plasmid including a helper-dependent genome that includes terminal sequences derived from Ad35 (plasmid 5475).

[0091] FIG. 13B is a pair of images showing cesium chloride gradient purification of helper-dependent adenovirus produced using an Ad35 helper genome according to the present disclosure. Images represent two successive rounds of purification. The HDAd preparation subjected to the cesium chloride gradient purification was produced by transfecting 116 cells with a plasmid including an Ad35 helper genome according to the present disclosure (pEN0057) and a plasmid including a helper-dependent genome that includes terminal sequences derived from Ad35 (plasmid 5475).

[0092] FIG. 14 is an image of a gel, together with a table describing the gel. The gel shows digestion of adenoviral genomes obtained from 116 cells transfected with a plasmid including an Ad35 helper genome according to the present disclosure (pEN0056 or pEN0057) and plasmid 5475, then purified by two successive rounds of cesium chloride gradient purification. As indicated in the table included in the figure, the purified adenoviral genomes were digested with SacII (lanes 4 and 5), while parental plasmids were also digest for comparison (lanes 2 and 3). In lane 3, plasmid 5475 was digested with PmeI (releases the helper-dependent genome from the plasmid 5475 backbone) and SacII. In lane 2, helper plasmid pEN0057 was digested with PmeI (releases helper genome from the plasmid backbone of pEN0057) and SacII. Digestion of helper plasmid pEN0056 is predicted to display a comparable restriction pattern to that of pEN0057.

[0093] FIG. 15A is a pair of images showing cesium chloride gradient purification of helper-dependent adenovirus produced using an Ad35 helper genome according to the present disclosure. Images represent two successive rounds of purification. The HDAd preparation subjected to the cesium chloride gradient purification was produced by transfecting 116 cells with a plasmid including an Ad35 helper genome according to the present disclosure (pEN0057) and a plasmid including an exemplary helper-dependent genome that includes terminal sequences derived from Ad35 (plasmid 1).

[0094] FIG. 15B is a pair of images showing cesium chloride gradient purification of helper-dependent adenovirus produced using an Ad35 helper genome according to the present disclosure. Images represent two successive rounds of purification. The HDAd preparation subjected to the cesium chloride gradient purification was produced by transfecting 116 cells with a plasmid including an Ad35 helper genome according to the present disclosure (pEN0057) and a plasmid including an exemplary helper-dependent genome that includes terminal sequences derived from Ad35 (plasmid 2).

[0095] FIG. 16 is an image of a gel, together with a table describing the gel. The gel shows digestion of adenoviral genomes obtained from 116 cells transfected with a plasmid including an Ad35 helper genome according to the present disclosure (pEN0057), and plasmid 1 or plasmid 2, then purified by two successive rounds of cesium chloride gradient purification. As indicated in the table included in the figure, the purified adenoviral genomes were digested with EcoRV (lanes 3, 5, and 6), while parental plasmids were also digest for comparison (lanes 2, 4, and 7). In lanes 4 and 7, plasmid 1 or plasmid 2 was digested with PmeI (releases the helper-dependent genome from the plasmid 5475 backbone) and EcoRV. In lane 2, helper plasmid pEN0057 was digested with SwaI (releases helper genome from the plasmid backbone of pEN0057) and EcoRV.

### DETAILED DESCRIPTION

[0096] The present disclosure includes adenoviral serotype 3, 7, 11, 14, 16, 21, 34, and 50 (Ad3, Ad7, Ad11, Ad14, Ad16, Ad21, Ad34, and Ad50, respectively) vectors and Ad3, Ad7, Ad11, Ad14, Ad16, Ad21, Ad34, and Ad50 genomes useful in gene therapy. Adenoviruses are large, icosahedral-shaped, non-enveloped viruses. As those of skill in the art are aware, adenoviral serotypes are grouped into adenoviral species known in the art. Seven exemplary adenoviral are species A, B, C, D, E, F, and G. The species C adenoviral serotype 5 (Ad5) is commonly used to generate adenoviral vectors, e.g., for therapeutic use. The present disclosure includes the recognition that there is a need for methods and compositions that support use of alternative adenoviral serotypes, and in particular adenoviral serotypes of other adenoviral species, e.g., for gene therapy. For example, use of certain species B serotypes may be desirable for generating adenoviral vectors and genomes for use in gene therapy. Adenoviral species B serotypes include adenoviral serotypes Ad3, Ad7, Ad11, Ad14, Ad16, Ad21, Ad34, Ad50, and Ad35. The present disclosure further includes the recognition that adenoviral serotypes within a species are more similar (e.g., have more similar genomes and/or packaging sequences, as can be measured for example by sequence identity) than adenoviral serotypes of distinct species, and moreover that for at least this reason methods and compositions disclosed herein can be applied across serotypes of a relevant species (e.g., across species B adenoviral serotypes). While some viral vectors are characterized by relatively high immunogenicity in human populations and/or by relatively low payload capacity, Ad3, Ad7, Ad11, Ad14, Ad16, Ad21, Ad34, and Ad50 vectors are characterized by relatively low immunogenicity in human populations and relatively high payload capacity. However, engineering of Ad3, Ad7, Ad11, Ad14, Ad16, Ad21, Ad34, and Ad50 vectors and genomes for use in gene therapy is not straightforward. The present disclosure includes, among other things, engineering of Ad3, Ad7, Ad11, Ad14, Ad16, Ad21, Ad34, and Ad50 helper vectors useful in producing therapeutic Ad3, Ad7, Ad11, Ad14, Ad16, Ad21, Ad34, and Ad50 donor vectors and/or in methods of gene therapy.

[0097] Those of skill in the art will appreciate that, throughout the present disclosure, references to particular nucleotide positions and/or positions corresponding thereto disclose both the specific position identified and similar positions, e.g., positions within 10, 9, 8, 7, 6, 5, 4, 3, 2, or 1 nucleotides of an indicated position. Moreover, in various embodiments in which a heterologous sequence is inserted into or positioned within a sequence corresponding to a reference adenoviral genome, the specific point of insertion can be equivalently referred to by multiple positions if the inserted sequence includes nucleotides adjacent to reference sequence that are the same as would be found in the reference sequence. In various such embodiments, the insertion can be identified as an insertion after any nucleotide position that is contiguous with reference sequence nucleotides and identical in sequence to a corresponding nucleotide of the reference sequence.

[0098] Adenoviral genomes such as the Ad3, Ad7, Ad11, Ad14, Ad16, Ad21, Ad34, and Ad50 genomes include DNA flanked on both ends by serotype-specific inverted terminal repeats (ITRs), which are understood to be cis elements that contribute to or are necessary for viral genome replication. ITRs can be, e.g., approximately 100-200 base pairs (e.g., about 160 base pairs) in length, with highest conservation at nucleotide positions (e.g., ˜50 base pairs) closest to the adenoviral genome termini. In various embodiments, an adenoviral genome of the present disclosure includes a 5′ ITR and a 3′ ITR that are derived from the same serotype. In various embodiments, Ad3, Ad7, Ad11, Ad14, Ad16, Ad21, Ad34, and Ad50 ITRs include a 5′ ITR according to SEQ ID NOs: 101, 119, 137, 155, 173, 191, 209, and 227, and a 3′ ITR according to SEQ ID NOs: 102, 120, 138, 156, 174, 192, 210, and 228. In various embodiments, an Ad3, Ad7, Ad11, Ad14, Ad16, Ad21, Ad34, or Ad50 5′ ITR includes at least 80 nucleotides (e.g., at least 80, 90, 100, 110, 120, 130, 140, 150, 160, 170, 180, 190, or 200 nucleotides, e.g., a number of nucleotides having a lower bound of 80, 90, 100, 110, 120, or 130 nucleotides and an upper bound of 130, 140, 150, 160, 170, 180, 190, or 200 nucleotides) having at least 80% sequence identity (e.g., at least 80%, 85%, 90%, 95%, 96%, 97%, 98%, or 99% sequence identity) with a corresponding fragment of nucleotides 1-200 of SEQ ID NOs: 263, 264, 265, 266, 267, 268, 269, or 270, and an Ad3, Ad7, Ad11, Ad14, Ad16, Ad21, Ad34, or Ad50 3′ ITR includes at least 80 nucleotides (e.g., at least 80, 90, 100, 110, 120, 130, 140, 150, 160, 170, 180, 190, or 200 nucleotides, e.g., a number of nucleotides having a lower bound of 80, 90, 100, 110, 120, or 130 nucleotides and an upper bound of 130, 140, 150, 160, 170, 180, 190, or 200 nucleotides) having at least 80% sequence identity (e.g., at least 80%, 85%, 90%, 95%, 96%, 97%, 98%, or 99% sequence identity) with a corresponding fragment of 200 nucleotides at the end of SEQ ID NOs: 263, 264, 265, 266, 267, 268, 269, or 270. In various embodiments, an ITR is sufficient for one or both of Ad35 encapsidation and/or replication. In various embodiments, an Ad7, Ad11, Ad14, Ad16, Ad34, or Ad50 ITR sequence for Ad7, Ad11, Ad14, Ad16, Ad34, or Ad50 vectors differs in that the first 8 bp are CTATCTAT (SEQ ID NO: 12) rather than the canonical sequence at positions 1-8 of a reference Ad7, Ad11, Ad14, Ad16, Ad34, or Ad50 genome sequence (Wunderlich et al., J. Gen Virol. 95:1574-1584 (2014)).

[0099] Adenoviral genomes also include a cis-acting packaging sequence (e.g., a conditional or non-conditional packaging sequence, the packaging sequence sometimes represented by the symbol ψ), which can facilitate packaging of the viral genome into viral vectors. In various embodiments, a packaging sequence can be positioned in the 5′ portion of an Ad genome, with the 5′ ITR.

[0100] Natural adenoviral genomes encode several proteins including early transcriptional units, E1, E2, E3, and E4 and late transcriptional units which encode structural protein components of the adenoviral vector. Early (E) and late (L) transcription are divided by the onset of viral genome replication. Late transcription includes expression of proteins that make up the viral capsid. Adenoviral capsids include three types of proteins: fiber, penton, and hexon.

[0101] In various embodiments, an Ad3, Ad7, Ad11, Ad14, Ad16, Ad21, Ad34, or Ad50 genome is a single-stranded or double-stranded DNA sequence that includes ITRs of an Ad3, Ad7, Ad11, Ad14, Ad16, Ad21, Ad34, or Ad50 vector (e.g., a 5′ ITR according to SEQ ID NOs: 101, 119, 137, 155, 173, 191, 209, or 227, and a 3′ ITR according to SEQ ID NOs: 102, 120, 138, 156, 174, 192, 210, or 228), or ITRs that individually and/or together have at least 75% sequence identity (e.g., at least 75%, 80%, 85%, 90%, 95%, 96%, 97%, 98%, 99%, or 100% identity) thereto.

[0102] In various embodiments, an Ad3, Ad7, Ad11, Ad14, Ad16, Ad21, Ad34, or Ad50 genome is a single-stranded or double-stranded DNA sequence that includes a packaging sequence of an Ad3, Ad7, Ad11, Ad14, Ad16, Ad21, Ad34, or Ad50 vector (e.g., a packaging sequence according to SEQ ID NOs: 103, 121, 139, 157, 175, 193, 211, or 229), or a packaging sequence having at least 75% sequence identity (e.g., at least 75%, 80%, 85%, 90%, 95%, 96%, 97%, 98%, 99%, or 100% identity) to the entirety or a portion thereof.

[0103] In various embodiments, an Ad3, Ad7, Ad11, Ad14, Ad16, Ad21, Ad34, or Ad50 genome is a single-stranded or double-stranded DNA sequence that includes a sequence with at least 75% sequence identity (e.g., at least 75%, 80%, 85%, 90%, 95%, 96%, 97%, 98%, 99%, or 100% identity) to all, a portion of, or a contiguous corresponding portion of, or a discontiguous corresponding portion of a reference Ad3, Ad7, Ad11, Ad14, Ad16, Ad21, Ad34, or Ad50 genome (e.g., SEQ ID NOs: 263, 264, 265, 266, 267, 268, 269, or 270).

[0104] In various embodiments, an Ad3, Ad7, Ad11, Ad14, Ad16, Ad21, Ad34, or Ad50 genome is any nucleotide sequence that includes at least ITRs of an Ad3, Ad7, Ad11, Ad14, Ad16, Ad21, Ad34, or Ad50 vector (e.g., a 5′ ITR according to SEQ ID NOs: 101, 119, 137, 155, 173, 191, 209, or 227, and a 3′ ITR according to SEQ ID NOs: 102, 120, 138, 156, 174, 192, 210, or 228), or ITRs that individually and/or together have at least 75% sequence identity (e.g., at least 75%, 80%, 85%, 90%, 95%, 96%, 97%, 98%, 99%, or 100% identity) thereto.

[0105] In various embodiments, an Ad3, Ad7, Ad11, Ad14, Ad16, Ad21, Ad34, or Ad50 genome is an Ad3, Ad7, Ad11, Ad14, Ad16, Ad21, Ad34, or Ad50 genome from which one or more nucleotides, coding sequences, and/or genes are completely or partially deleted as compared to a reference sequence. For example, in some embodiments, an Ad3, Ad7, Ad11, Ad14, Ad16, Ad21, Ad34, or Ad50 genome can be a genome that does not include one or more of an E1, E2, E3, and/or E4 region. In certain embodiments, an Ad3, Ad7, Ad11, Ad14, Ad16, Ad21, Ad34, or Ad50 genome is a genome that does not include any coding sequences of an Ad3, Ad7, Ad11, Ad14, Ad16, Ad21, Ad34, or Ad50 genome (e.g., a “gutless” vector that includes ITRs having at least 75% sequence identity to Ad3, Ad7, Ad11, Ad14, Ad16, Ad21, Ad34, or Ad50 genome ITRs but includes none of the coding sequences present in a reference Ad3, Ad7, Ad11, Ad14, Ad16, Ad21, Ad34, or Ad50 genome).

[0106] In various embodiments, an Ad3, Ad7, Ad11, Ad14, Ad16, Ad21, Ad34, or Ad50 genome includes, does not include, or includes a deletion of, all or a portion of an E1 sequence according to SEQ ID NOs: 104, 122, 140, 158, 176, 194, 212, or 230, or a sequence having at least 75% sequence identity (e.g., at least 75%, 80%, 85%, 90%, 95%, 96%, 97%, 98%, 99%, or 100% identity) thereto.

[0107] In various embodiments, an Ad3, Ad7, Ad11, Ad14, Ad16, Ad21, Ad34, or Ad50 genome includes, does not include, or includes a deletion of, all or a portion of an E2 sequence according to SEQ ID NOs: 105, 123, 141, 159, 177, 195, 213, or 231, or a sequence having at least 75% sequence identity (e.g., at least 75%, 80%, 85%, 90%, 95%, 96%, 97%, 98%, 99%, or 100% identity) thereto.

[0108] In various embodiments, an Ad3, Ad7, Ad11, Ad14, Ad16, Ad21, Ad34, or Ad50 genome includes, does not include, or includes a deletion of, all or a portion of an E3 sequence according to SEQ ID NOs: 106, 124, 142, 160, 178, 196, 214, or 232, or a sequence having at least 75% sequence identity (e.g., at least 75%, 80%, 85%, 90%, 95%, 96%, 97%, 98%, 99%, or 100% identity) thereto.

[0109] In various embodiments, an Ad3, Ad7, Ad11, Ad14, Ad16, Ad21, Ad34, or Ad50 genome includes, or does not include, a sequence that encodes a fiber, where the sequence has at least 75% sequence identity (e.g., at least 75%, 80%, 85%, 90%, 95%, 96%, 97%, 98%, 99%, or 100% identity) to SEQ ID NOs: 107, 125, 143, 161, 179, 197, 215, or 233.

[0110] In various embodiments, an Ad3, Ad7, Ad11, Ad14, Ad16, Ad21, Ad34, or Ad50 genome includes, or does not include, a sequence that encodes a fiber tail, where the sequence has at least 75% sequence identity (e.g., at least 75%, 80%, 85%, 90%, 95%, 96%, 97%, 98%, 99%, or 100% identity) to SEQ ID NOs: 108, 126, 144, 162, 180, 198, 216, or 234.

[0111] In various embodiments, an Ad3, Ad7, Ad11, Ad14, Ad16, Ad21, Ad34, or Ad50 genome includes, or does not include, a sequence that encodes a fiber shaft, where the sequence has at least 75% sequence identity (e.g., at least 75%, 80%, 85%, 90%, 95%, 96%, 97%, 98%, 99%, or 100% identity) to SEQ ID NOs: 109, 127, 145, 163, 181, 199, 217, or 235.

[0112] In various embodiments, an Ad3, Ad7, Ad11, Ad14, Ad16, Ad21, Ad34, or Ad50 genome includes, or does not include, a sequence that encodes a fiber knob, where the sequence has at least 75% sequence identity (e.g., at least 75%, 80%, 85%, 90%, 95%, 96%, 97%, 98%, 99%, or 100% identity) to SEQ ID NOs: 110, 128, 146, 164, 182, 200, 218, or 236.

[0113] In various embodiments, an Ad3, Ad7, Ad11, Ad14, Ad16, Ad21, Ad34, or Ad50 genome includes, or does not include, a sequence that encodes a penton, where the sequence has at least 75% sequence identity (e.g., at least 75%, 80%, 85%, 90%, 95%, 96%, 97%, 98%, 99%, or 100% identity) to SEQ ID NOs: 111, 129, 147, 165, 183, 201, 219, or 237.

[0114] In various embodiments, an Ad3, Ad7, Ad11, Ad14, Ad16, Ad21, Ad34, or Ad50 genome includes, or does not include, a sequence that encodes a hexon, where the sequence has at least 75% sequence identity (e.g., at least 75%, 80%, 85%, 90%, 95%, 96%, 97%, 98%, 99%, or 100% identity) to SEQ ID NOs: 112, 130, 148, 166, 184, 202, 220, or 238.

[0115] The present disclosure includes Ad3, Ad7, Ad11, Ad14, Ad16, Ad21, Ad34, or Ad50 vectors that include a fiber having at least 75% sequence identity (e.g., at least 75%, 80%, 85%, 90%, 95%, 96%, 97%, 98%, 99%, or 100% identity) to an Ad3, Ad7, Ad11, Ad14, Ad16, Ad21, Ad34, or Ad50 fiber (e.g., a fiber according to SEQ ID NOs: 113, 131, 149, 167, 185, 203, 221, or 239).

[0116] The present disclosure includes Ad3, Ad7, Ad11, Ad14, Ad16, Ad21, Ad34, or Ad50 vectors that include a fiber shaft having at least 75% sequence identity (e.g., at least 75%, 80%, 85%, 90%, 95%, 96%, 97%, 98%, 99%, or 100% identity) to an Ad3, Ad7, Ad11, Ad14, Ad16, Ad21, Ad34, or Ad50 fiber shaft (e.g., a fiber shaft according to SEQ ID NOs: 114, 132, 150, 168, 186, 204, 222, or 240).

[0117] The present disclosure includes Ad3, Ad7, Ad11, Ad14, Ad16, Ad21, Ad34, or Ad50 vectors that include a fiber knob having at least 75% sequence identity (e.g., at least 75%, 80%, 85%, 90%, 95%, 96%, 97%, 98%, 99%, or 100% identity) to an Ad3, Ad7, Ad11, Ad14, Ad16, Ad21, Ad34, or Ad50 fiber knob (e.g., a fiber knob according to SEQ ID NOs: 115, 133, 151, 169, 187, 205, 223, or 241).

[0118] The present disclosure includes Ad3, Ad7, Ad11, Ad14, Ad16, Ad21, Ad34, or Ad50 vectors that include a penton having at least 75% sequence identity (e.g., at least 75%, 80%, 85%, 90%, 95%, 96%, 97%, 98%, 99%, or 100% identity) to an Ad3, Ad7, Ad11, Ad14, Ad16, Ad21, Ad34, or Ad50 penton (e.g., a penton according to SEQ ID NOs: 116, 134, 152, 170, 188, 206, 224, or 242).

[0119] The present disclosure includes Ad3, Ad7, Ad11, Ad14, Ad16, Ad21, Ad34, or Ad50 vectors that include a hexon having at least 75% sequence identity (e.g., at least 75%, 80%, 85%, 90%, 95%, 96%, 97%, 98%, 99%, or 100% identity) to an Ad3, Ad7, Ad11, Ad14, Ad16, Ad21, Ad34, or Ad50 hexon (e.g., a hexon according to SEQ ID NOs: 117, 135, 153, 171, 189, 207, 225, or 243).

[0120] The present disclosure includes Ad3, Ad7, Ad11, Ad14, Ad16, Ad21, Ad34, or Ad50 vectors that include a fiber tail having at least 75% sequence identity (e.g., at least 75%, 80%, 85%, 90%, 95%, 96%, 97%, 98%, 99%, or 100% identity) to an Ad3, Ad7, Ad11, Ad14, Ad16, Ad21, Ad34, or Ad50 fiber tail (e.g., a fiber tail according to SEQ ID NOs: 118, 136, 154, 172, 190, 208, 226, or 244, e.g., where the fiber tail is the portion of the fiber including all amino acids N-terminal to the fiber shaft).

[0121] In various embodiments, an Ad3, Ad7, Ad11, Ad14, Ad16, Ad21, Ad34, or Ad50 vector is any adenoviral vector that includes at least a fiber having at least 75% sequence identity (e.g., at least 75%, 80%, 85%, 90%, 95%, 96%, 97%, 98%, 99%, or 100% identity) to an Ad3, Ad7, Ad11, Ad14, Ad16, Ad21, Ad34, or Ad50 fiber (e.g., a fiber according to SEQ ID NOs: 113, 131, 149, 167, 185, 203, 221, or 239), respectively.

[0122] In various embodiments, an Ad3, Ad7, Ad11, Ad14, Ad16, Ad21, Ad34, or Ad50 vector is any adenoviral vector that includes at least a fiber shaft having at least 75% sequence identity (e.g., at least 75%, 80%, 85%, 90%, 95%, 96%, 97%, 98%, 99%, or 100% identity) to an Ad3, Ad7, Ad11, Ad14, Ad16, Ad21, Ad34, or Ad50 fiber shaft (e.g., a fiber shaft according to SEQ ID NOs: 114, 132, 150, 168, 186, 204, 222, or 240), respectively.

[0123] In various embodiments, an Ad3, Ad7, Ad11, Ad14, Ad16, Ad21, Ad34, or Ad50 vector is any adenoviral vector that includes at least a fiber knob having at least 75% sequence identity (e.g., at least 75%, 80%, 85%, 90%, 95%, 96%, 97%, 98%, 99%, or 100% identity) to an Ad3, Ad7, Ad11, Ad14, Ad16, Ad21, Ad34, or Ad50 fiber knob (e.g., a fiber knob according to SEQ ID NOs: 115, 133, 151, 169, 187, 205, 223, or 241), respectively.

[0124] In various embodiments, an Ad3, Ad7, Ad11, Ad14, Ad16, Ad21, Ad34, or Ad50 vector is any adenoviral vector that includes at least a penton having at least 75% sequence identity (e.g., at least 75%, 80%, 85%, 90%, 95%, 96%, 97%, 98%, 99%, or 100% identity) to an Ad3, Ad7, Ad11, Ad14, Ad16, Ad21, Ad34, or Ad50 penton (e.g., a penton according to SEQ ID NOs: 116, 134, 152, 170, 188, 206, 224, or 242), respectively.

[0125] In various embodiments, an Ad3, Ad7, Ad11, Ad14, Ad16, Ad21, Ad34, or Ad50 vector is any adenoviral vector that includes at least a hexon having at least 75% sequence identity (e.g., at least 75%, 80%, 85%, 90%, 95%, 96%, 97%, 98%, 99%, or 100% identity) to an Ad3, Ad7, Ad11, Ad14, Ad16, Ad21, Ad34, or Ad50 hexon (e.g., a hexon according to SEQ ID NOs: 117, 135, 153, 171, 189, 207, 225, or 243), respectively.

[0126] In various embodiments, an Ad3, Ad7, Ad11, Ad14, Ad16, Ad21, Ad34, or Ad50 vector is any adenoviral vector that includes at least a fiber tail having at least 75% sequence identity (e.g., at least 75%, 80%, 85%, 90%, 95%, 96%, 97%, 98%, 99%, or 100% identity) to an Ad3, Ad7, Ad11, Ad14, Ad16, Ad21, Ad34, or Ad50 fiber tail (e.g., a fiber tail according to SEQ ID NOs: 118, 136, 154, 172, 190, 208, 226, or 244, e.g., where the fiber tail is the portion of the fiber including all amino acids N-terminal to the fiber shaft), respectively.

[0127] In various embodiments, an Ad3, Ad7, Ad11, Ad14, Ad16, Ad21, Ad34, or Ad50 vector is any adenoviral vector that includes at least 5′ and 3′ ITRs individually and/or together having at least 75% sequence identity (e.g., at least 75%, 80%, 85%, 90%, 95%, 96%, 97%, 98%, 99%, or 100% identity) to ITRs of Ad3, Ad7, Ad11, Ad14, Ad16, Ad21, Ad34, or Ad50 (e.g., a 5′ ITR according to SEQ ID NOs: 101, 119, 137, 155, 173, 191, 209, or 227, and a 3′ ITR according to SEQ ID NOs: 102, 120, 138, 156, 174, 192, 210, or 228), respectively.

[0128] Thus, an Ad3, Ad7, Ad11, Ad14, Ad16, Ad21, Ad34, or Ad50 vector can be a chimeric adenoviral vector that includes at least a fiber knob having at least 75% sequence identity (e.g., at least 75%, 80%, 85%, 90%, 95%, 96%, 97%, 98%, 99%, or 100% identity) to an Ad3, Ad7, Ad11, Ad14, Ad16, Ad21, Ad34, or Ad50 fiber knob and at least one protein or portion thereof (such as a fiber shaft, fiber tail, penton, or hexon) that has at least 75% sequence identity (e.g., at least 75%, 80%, 85%, 90%, 95%, 96%, 97%, 98%, 99%, or 100% identity) to a different adenoviral serotype.

[0129] An Ad3, Ad7, Ad11, Ad14, Ad16, Ad21, Ad34, or Ad50 vector can be a chimeric adenoviral vector that includes at least a fiber shaft having at least 75% sequence identity (e.g., at least 75%, 80%, 85%, 90%, 95%, 96%, 97%, 98%, 99%, or 100% identity) to an Ad3, Ad7, Ad11, Ad14, Ad16, Ad21, Ad34, or Ad50 fiber shaft and at least one protein or portion thereof (such as a fiber knob, fiber shaft, fiber tail, penton, or hexon) that has at least 75% sequence identity (e.g., at least 75%, 80%, 85%, 90%, 95%, 96%, 97%, 98%, 99%, or 100% identity) to a different adenoviral serotype.

[0130] An Ad3, Ad7, Ad11, Ad14, Ad16, Ad21, Ad34, or Ad50 vector can be a chimeric adenoviral vector that includes at least a fiber tail having at least 75% sequence identity (e.g., at least 75%, 80%, 85%, 90%, 95%, 96%, 97%, 98%, 99%, or 100% identity) to an Ad3, Ad7, Ad11, Ad14, Ad16, Ad21, Ad34, or Ad50 fiber tail and at least one protein or portion thereof (such as a fiber knob, fiber shaft, penton, or hexon) that has at least 75% sequence identity (e.g., at least 75%, 80%, 85%, 90%, 95%, 96%, 97%, 98%, 99%, or 100% identity) to a different adenoviral serotype.

[0131] An Ad3, Ad7, Ad11, Ad14, Ad16, Ad21, Ad34, or Ad50 vector can be a chimeric adenoviral vector that includes at least a penton having at least 75% sequence identity (e.g., at least 75%, 80%, 85%, 90%, 95%, 96%, 97%, 98%, 99%, or 100% identity) to an Ad3, Ad7, Ad11, Ad14, Ad16, Ad21, Ad34, or Ad50 penton and at least one protein or portion thereof (such as a fiber knob, fiber shaft, fiber tail, or hexon) that has at least 75% sequence identity (e.g., at least 75%, 80%, 85%, 90%, 95%, 96%, 97%, 98%, 99%, or 100% identity) to a different adenoviral serotype.

[0132] An Ad3, Ad7, Ad11, Ad14, Ad16, Ad21, Ad34, or Ad50 vector can be a chimeric adenoviral vector that includes at least a hexon having at least 75% sequence identity (e.g., at least 75%, 80%, 85%, 90%, 95%, 96%, 97%, 98%, 99%, or 100% identity) to an Ad3, Ad7, Ad11, Ad14, Ad16, Ad21, Ad34, or Ad50 hexon and at least one protein or portion thereof (such as a fiber knob, fiber shaft, fiber tail, or penton) that has at least 75% sequence identity (e.g., at least 75%, 80%, 85%, 90%, 95%, 96%, 97%, 98%, 99%, or 100% identity) to a different adenoviral serotype.

[0133] Ad35 fiber is a fiber protein trimer, each fiber protein includes an N-terminal tail domain that interacts with the pentameric penton base, a C-terminal globular knob domain (fiber knob) that functions as the attachment site for the host cell receptors, and a central shaft domain that connects the tail and the knob domains (shaft). In various embodiments, an Ad35 fiber knob has at least 80% sequence identity (e.g., at least 80%, 85%, 90%, 95%, 96%, 97%, 98%, or 99% sequence identity) with reference fiber sequence NCBI accession no. AP_000601. In various embodiments, an Ad35 fiber knob includes amino acids 123 to 320 or 323 of a canonical wild-type Ad35 fiber protein. In various embodiments, an Ad35 fiber knob includes at least 60 amino acids (e.g., at least 60, 70, 80, 90, 100, 110, 120, 130, 140, 150, 160, 170, 180, 190, or 198 amino acids) having at least 80% sequence identity (e.g., at least 80%, 85%, 90%, 95%, 96%, 97%, 98%, or 99% sequence identity) with a corresponding fragment of amino acids 123 to 320 or 323 of a canonical wild-type Ad35 fiber protein.

[0134] In various embodiments, a vector such as a helper vector or donor vector includes, or a helper genome encodes, fiber knob mutations as compared to a reference or canonical Ad35 fiber knob, where the mutations increase affinity of the vector, fiber, and/or fiber knob with CD46 (see, e.g. Table 1). In various embodiments, an adenoviral vector such as a helper vector or donor vector includes, or an Ad35 helper genome encodes, an Ad35++ mutant fiber knob. An Ad35++ mutant fiber knob is a fiber knob that includes mutations as compared to a reference or canonical Ad35 fiber knob, where the mutations increase affinity with CD46, e.g., optionally wherein the increase is an increase of up to or at least 1.1-fold, e.g., up to at least 1, 2, 3, 4, 5, 10, 15, 20, or 25-fold. Increased affinity with CD46 can increase efficiency of target cell transduction and/or decrease the multiplicity of infection (MOI) required to achieve a target level of transduction (Li and Lieber, FEBS Letters, 593(24):3623-3648 (2019)). In various embodiments, an Ad35++ mutant fiber knob includes at least one mutation selected from Ile192Val, Asp207Gly (or Glu207Gly in certain Ad35 sequences), Asn217Asp, Thr226Ala, Thr245Ala, Thr254Pro, Ile256Leu, Ile256Val, Arg259Cys, and Arg279His. In various embodiments, an Ad35++ mutant fiber knob includes each of the following mutations: Ile192Val, Asp207Gly (or Glu207Gly in certain Ad35 sequences), Asn217Asp, Thr226Ala, Thr245Ala, Thr254Pro, Ile256Leu, Ile256Val, Arg259Cys, and Arg279His. In various embodiments, amino acid numbering of an Ad35 fiber is according to NCBI accession no. AP_000601 or an amino acid sequence corresponding thereto, e.g., where position 207 is Glu or Asp. In various embodiments, an Ad35 fiber has an amino acid sequence according to NCBI accession no. AP_000601. Further description of Ad35++ fiber knob mutations is found in Wang et al., J. Virol. 82(21):10567-10579 (2008), which is incorporated herein by reference in its entirety and with respect to fiber knobs. The present disclosure includes, for example, a recombinant Ad3, Ad7, Ad11, Ad14, Ad16, Ad21, Ad34, or Ad50 vector with an Ad35++ mutant fiber knob or chimeric Ad3, Ad7, Ad11, Ad14, Ad16, Ad21, Ad34, or Ad50 vector with an Ad35++ mutant fiber knob.

TABLE 1
Mutated Ad35 Knob increased binding to CD46

| | Kd | |
|---|---|---|
| A1: Asn217Asp Thr245Pro Ile256Leu* | A1 4.82 nM | |
| A2: Asp207Gly Thr245Ala* | A2 0.629 nM | |
| A3: Asp207Gly Thr226Ala* | A3 1.407 nM | |
| A8: Ile192Val Ile256Val | A8 13.6850 nM | |
| B1: Asp207Gly* | B1 1.774 nM | |
| B2: wtAd35(207Asp) | B2 14.98 nM | |
| B3: Asn217Asp* | B3 16.85 nM | |
| B4: Thr245Ala* | B4 7.64 nM | |
| B5: Ile256Leu* | B5 10.96 nM | |
| B6: Ad3 | B6 no binding | |
| B7: Ad11 | B7 11.22 nM | |
| M1: Arg279Cys** | M1 no binding | |
| M3: Arg279His** | M3 no binding | |
| wtAd35* | 13.7 | nM |
| wtAd35* | 15.36 | nM |
| AA: Asp207Gly Thr245Ala Ile256Leu* | 0.943 | nM |

*Published in Wang et al., J. Virol. 82(21): 10567-10579 (2008)
**Published in Wang et al., J. Virol. 81(23): 12785-12792 (2007)

[0135] Helper genomes encode various proteins required for viral particle production. In various embodiments, a helper genome can include one or more, or all, adenoviral genes and/or encode one or more, or all, adenoviral proteins encoded and/or expressed by a reference genome of the helper genome serotype, excluding, e.g., those removed from the helper genome by an E1 region deletion, E2 region deletion, E3 region deletion, and/or E4 region deletion, and/or by any other deletions.

[0136] Exemplary sequences of Ad3, Ad7, Ad11, Ad14, Ad16, Ad21, Ad34, and Ad50 components (e.g., ITRs, packaging sequences, genes, and proteins) are provided in the following tables. Viral polypeptides include proteins that are components of viral vectors and portions or fragments thereof, and examples of viral polypeptides therefore include, for example a fiber, fiber knob, fiber shaft, fiber tail, penton, or hexon. An exemplary listing of adenoviral genes and proteins is provided in Table 20 for Ad35. Table 20 relates to an exemplary genome of a natural Ad35 adenovirus (see, e.g., Gao et al., 2003 Gene Ther. 10(23): 1941-9; Reddy et al. 2003 Virology 311(2): 384-393; GenBank accession no. AY128640). Other examples of Ad35 reference genomes can include NCBI accession no. AC_000019 and GenBank accession nos. AY271307 and AX049983.

[0137] Various sequences corresponding to accession numbers disclosed herein, including e.g., sequences associated with accession numbers referred to herein as SEQ ID NOs: 263, 264, 265, 266, 267, 268, 269, 270, and/or 271 as indicated in Tables 2-19 are provided herein in the below listing of accession sequences. Those of skill in the art will appreciate that such sequences, including the sequences disclosed in the below listing of accession sequences, can be referenced in whole (e.g., by an accession number) or in part (e.g., by reference to a nucleotide position and/or a set or range of nucleotide positions of a sequence and/or accession number). Additionally, those of skill in the art will appreciate that a reference to a particular serotype can be interpreted as a reference to a corresponding reference sequence (e.g., an accession sequence) of the serotype; and similarly, a reference to a reference sequence (e.g., an accession sequence) of a particular serotype can be interpreted as a reference to the corresponding serotype.

TABLE 2
Ad3 Genomic Sequences
Ad3 Genomic Sequences
Reference Ad3 Genome Sequence: NCBI accession
no. NC_011203 (SEQ ID NO: 263)

| | Exemplary Sequence | SEQ |
|---|---|---|
| Component | (position in reference) | ID NO: |
| Ad3 5′ (left) ITR | 1-136 | 101 |
| Ad3 3′ (right) ITR | 35208-35343 | 102 |
| Ad3 Packaging | 137-479 | 103 |
| Sequence | | |
| Ad3 E1 | 480-3918 | 104 |
| Ad3 E2 | 26643-3947 | 105 |
| Ad3 E3 | 27085-31186 | 106 |
| Ad3 fiber | 31368-32327 | 107 |
| Ad3 fiber tail | 31368-31493 | 108 |
| Ad3 fiber shaft | 31494-31763 | 109 |
| Ad3 fiber knob | 31764-32324 | 110 |
| Ad3 penton | 13905-15539 | 111 |
| Ad3 hexon | 18418-21252 | 112 |

TABLE 3
Ad3 Amino Acid Sequences
Ad3 Amino Acid Sequences

| | Exemplary Sequence | SEQ |
|---|---|---|
| Component | (position in reference) | ID NO: |
| Ad3 fiber | 1-319 (NCBI accession no. YP_002213796) | 113 |
| Ad3 fiber shaft | 43-132 (NCBI accession no. YP_002213796) | 114 |
| Ad3 fiber knob | 134-319 (NCBI accession no. YP_002213796) | 115 |
| Ad3 penton | 1-544 (NCBI accession no. YP_002213774) | 116 |
| Ad3 hexon | 1-944 (NCBI accession no. YP_002213779) | 117 |
| Ad3 fiber tail | 1-42 (NCBI accession no. YP_002213796) | 118 |

TABLE 4
Ad7 Genomic Sequences
Ad7 Genomic Sequences
Reference Ad7 Genome Sequence: GenBank
accession no. AY601634 (SEQ ID NO: 264)

| | Exemplary Sequence | SEQ |
|---|---|---|
| Component | (position in reference) | ID NO: |
| Ad7 5′ (left) ITR | 1-136 | 119 |
| Ad7 3′ (right) ITR | 35063-35198 | 120 |
| Ad7 Packaging Sequence | 137-479 | 121 |
| Ad7 E1 | 480-3918 | 122 |
| Ad7 E2 | 26554-3946 | 123 |
| Ad7 E3 | 26995-31030 | 124 |
| Ad7 fiber | 31214-32191 | 125 |
| Ad7 fiber tail | 31214-31339 | 126 |
| Ad7 fiber shaft | 31340-31612 | 127 |
| Ad7 fiber knob | 31613-32188 | 128 |
| Ad7 penton | 13855-15489 | 129 |
| Ad7 hexon | 18353-21157 | 130 |

TABLE 5
Ad7 Amino Acid Sequences
Ad7 Amino Acid Sequences

| | Exemplary Sequence | SEQ |
|---|---|---|
| Component | (position in reference) | ID NO: |
| Ad7 fiber | 1-325 (GenBank accession no. AP_000564) | 131 |
| Ad7 fiber shaft | 43-133 (GenBank accession no. AP_000564) | 132 |
| Ad7 fiber knob | 134-325 (GenBank accession no. AP_000564) | 133 |
| Ad7 penton | 1-544 (GenBank accession no. AP_000543) | 134 |
| Ad7 hexon | 1-934 (GenBank accession no. AP_000548) | 135 |
| Ad7 fiber tail | 1-42 (GenBank accession no. AP_000564) | 136 |

TABLE 6
Ad11 Genomic Sequences
Ad11 Genomic Sequences
Reference Ad11 Genome Sequence: NCBI
accession no. NC_011202 (SEQ ID NO: 265)

| | Exemplary Sequence | SEQ |
|---|---|---|
| Component | (position in reference) | ID NO: |
| Ad11 5′ (left) ITR | 1-137 | 137 |
| Ad11 3′ (right) ITR | 34658-34794 | 138 |
| Ad11 Packaging Sequence | 138-479 | 139 |
| Ad11 E1 | 480-3931 | 140 |
| Ad11 E2 | 25445-3963 | 141 |
| Ad11 E3 | 26866-30624 | 142 |
| Ad11 fiber | 30811-31788 | 143 |
| Ad11 fiber tail | 30811-30936 | 144 |
| Ad11 fiber shaft | 30937-31209 | 145 |
| Ad11 fiber knob | 31210-31785 | 146 |
| Ad11 penton | 13682-15367 | 147 |
| Ad11 hexon | 18254-21100 | 148 |

TABLE 7
Ad11 Amino Acid Sequences
Ad11 Amino Acid Sequences

| | Exemplary Sequence | SEQ |
|---|---|---|
| Component | (position in reference) | ID NO: |
| Ad11 fiber | 1-325 (GenBank accession no. YP_002213828) | 149 |
| Ad11 fiber | 43-133 (GenBank accession no. YP_002213828) | 150 |
| shaft | | |
| Ad11 fiber | 134-325 (GenBank accession no. | 151 |
| knob | YP_002213828) | |
| Ad11 penton | 1-561 (GenBank accession no. YP_002213807) | 152 |
| Ad11 hexon | 1-948 (GenBank accession no. YP_002213812) | 153 |
| Ad11 fiber | 1-42 (GenBank accession no. YP_002213828) | 154 |
| tail | | |

TABLE 8
Ad14 Genomic Sequences
Ad14 Genomic Sequences
Reference Ad14 Genome Sequence: GenBank
accession no. AY803294 (SEQ ID NO: 266)

| | Exemplary Sequence | SEQ |
|---|---|---|
| Component | (position in reference) | ID NO: |
| Ad14 5′ (left) ITR | 1-137 | 155 |
| Ad14 3′ (right) ITR | 34628-34764 | 156 |
| Ad14 Packaging Sequence | 138-479 | 157 |
| Ad14 E1 | 480-3947 | 158 |
| Ad14 E2 | 23389-3963 | 159 |
| Ad14 E3 | 26854-30601 | 160 |
| Ad14 fiber | 30788-31765 | 161 |
| Ad14 fiber tail | 30788-30913 | 162 |
| Ad14 fiber shaft | 30914-31186 | 163 |
| Ad14 fiber knob | 31187-31762 | 164 |
| Ad14 penton | 13698-15374 | 165 |
| Ad14 hexon | 18252-21089 | 166 |

TABLE 9
Ad14 Amino Acid Sequences
Ad14 Amino Acid Sequences

| | Exemplary Sequence | SEQ |
|---|---|---|
| Component | (position in reference) | ID NO: |
| Ad14 fiber | 1-325 (GenBank accession no. AAW33140) | 167 |
| Ad14 fiber | 43-133 (GenBank accession no. AAW33140) | 168 |
| shaft | | |
| Ad14 fiber | 134-325 (GenBank accession no. AAW33140) | 169 |
| knob | | |
| Ad14 penton | 1-558 (GenBank accession no. AAW33119) | 170 |
| Ad14 hexon | 1-945 (GenBank accession no. AAW33124) | 171 |
| Ad14 fiber | 1-42 (GenBank accession no. AAW33140) | 172 |
| tail | | |

TABLE 10
Ad16 Genomic Sequences
Ad16 Genomic Sequences
Reference Ad16 Genome Sequence: GenBank
accession no. AY601636 (SEQ ID NO: 267)

| | Exemplary Sequence | SEQ |
|---|---|---|
| Component | (position in reference) | ID NO: |
| Ad16 5′ (left) ITR | 1-114 | 173 |
| Ad16 3′ (right) ITR | 35409-35522 | 174 |
| Ad16 Packaging Sequence | 115-479 | 175 |
| Ad16 E1 | 480-3910 | 176 |
| Ad16 E2 | 23580-3954 | 177 |
| Ad16 E3 | 27107-31263 | 178 |
| Ad16 fiber | 31448-32509 | 179 |
| Ad16 fiber tail | 31448-31573 | 180 |
| Ad16 fiber shaft | 31574-31933 | 181 |
| Ad16 fiber knob | 31934-32506 | 182 |
| Ad16 penton | 13902-17534 | 183 |
| Ad16 hexon | 18450-21272 | 184 |

TABLE 11
Ad16 Amino Acid Sequences
Ad16 Amino Acid Sequences

| | Exemplary Sequence | SEQ |
|---|---|---|
| Component | (position in reference) | ID NO: |
| Ad16 fiber | 1-353 (GenBank accession no. AAW33461) | 185 |
| Ad16 fiber | 43-172 (GenBank accession no. AAW33461) | 186 |
| shaft | | |
| Ad16 fiber | 173-353 (GenBank accession no. AAW33461) | 187 |
| knob | | |
| Ad16 penton | 1-555 (GenBank accession no. AAW33439) | 188 |
| Ad16 hexon | 1-940 (GenBank accession no. AAW33444) | 189 |
| Ad16 fiber | 1-42 (GenBank accession no. AAW33461) | 190 |
| tail | | |

TABLE 12
Ad21 Genomic Sequences
Ad21 Genomic Sequences
Reference Ad21 Genome Sequence: GenBank
accession no. AY601633 (SEQ ID NO: 268)

| | Exemplary Sequence | SEQ |
|---|---|---|
| Component | (position in reference) | ID NO: |
| Ad21 5′ (left) ITR | 1-114 | 191 |
| Ad21 3′ (right) ITR | 35269-35382 | 192 |
| Ad21 Packaging Sequence | 115-479 | 193 |
| Ad21 E1 | 480-3911 | 194 |
| Ad21 E2 | 23611-3924 | 195 |
| Ad21 E3 | 27441-31208 | 196 |
| Ad21 fiber | 31406-32377 | 197 |
| Ad21 fiber tail | 31406-31531 | 198 |
| Ad21 fiber shaft | 31532-31804 | 199 |
| Ad21 fiber knob | 31805-32374 | 200 |
| Ad21 penton | 13878-15563 | 201 |
| Ad21 hexon | 18454-21303 | 202 |

TABLE 13
Ad21 Amino Acid Sequences
Ad21 Amino Acid Sequences

| | Exemplary Sequence | SEQ |
|---|---|---|
| Component | (position in reference) | ID NO: |
| Ad21 fiber | 1-323 (GenBank accession no. AAW33370) | 203 |
| Ad21 fiber | 43-133 (GenBank accession no. AAW33370) | 204 |
| shaft | | |
| Ad21 fiber | 134-323 (GenBank accession no. AAW33370) | 205 |
| knob | | |
| Ad21 penton | 1-561 (GenBank accession no. AAW33349) | 206 |
| Ad21 hexon | 1-949 (GenBank accession no. AAW33354) | 207 |
| Ad21 fiber | 1-42 (GenBank accession no. AAW33370) | 208 |
| tail | | |

TABLE 14
Ad34 Genomic Sequences
Ad34 Genomic Sequences
Reference Ad34 Genome Sequence: GenBank
accession no. AY737797 (SEQ ID NO: 269)

| | Exemplary Sequence | SEQ |
|---|---|---|
| Component | (position in reference) | ID NO: |
| Ad34 5′ (left) ITR | 1-137 | 209 |
| Ad34 3′ (right) ITR | 34639-34775 | 210 |
| Ad34 Packaging Sequence | 138-479 | 211 |
| Ad34 E1 | 480-3929 | 212 |
| Ad34 E2 | 23399-3945 | 213 |
| Ad34 E3 | 27185-30625 | 214 |
| Ad34 fiber | 30812-31783 | 215 |
| Ad34 fiber tail | 30812-30937 | 216 |
| Ad34 fiber shaft | 30938-31210 | 217 |
| Ad34 fiber knob | 31211-31780 | 218 |
| Ad34 penton | 13681-15357 | 219 |
| Ad34 hexon | 18244-21099 | 220 |

TABLE 15
Ad34 Amino Acid Sequences
Ad34 Amino Acid Sequences

| | Exemplary Sequence | SEQ |
|---|---|---|
| Component | (position in reference) | ID NO: |
| Ad34 fiber | 1-323 (GenBank accession no. AAW33501) | 221 |
| Ad34 fiber | 43-133 (GenBank accession no. AAW33501) | 222 |
| shaft | | |
| Ad34 fiber | 134-323 (GenBank accession no. AAW33501) | 223 |
| knob | | |
| Ad34 penton | 1-558 (GenBank accession no. ABC49791) | 224 |
| Ad34 hexon | 1-951 (GenBank accession no. AAW33485) | 225 |
| Ad34 fiber | 1-42 (GenBank accession no. AAW33501) | 226 |
| tail | | |

TABLE 16
Ad50 Genomic Sequences
Ad50 Genomic Sequences
Reference Ad50 Genome Sequence: GenBank
accession no. AY737798 (SEQ ID NO: 270)

| | Exemplary Sequence | SEQ |
|---|---|---|
| Component | (position in reference) | ID NO: |
| Ad50 5′ (left) ITR | 1-114 | 227 |
| Ad50 3′ (right) ITR | 35272-35385 | 228 |
| Ad50 Packaging Sequence | 115-479 | 229 |
| Ad50 E1 | 480-3910 | 230 |
| Ad50 E2 | 23590-3923 | 231 |
| Ad50 E3 | 27102-31222 | 232 |
| Ad50 fiber | 31409-32380 | 233 |
| Ad50 fiber tail | 31409-31534 | 234 |
| Ad50 fiber shaft | 31535-31807 | 235 |
| Ad50 fiber knob | 31808-32377 | 236 |
| Ad50 penton | 13888-15570 | 237 |
| Ad50 hexon | 18460-21282 | 238 |

TABLE 17
Ad50 Amino Acid Sequences
Ad50 Amino Acid Sequences

| | Exemplary Sequence | SEQ |
|---|---|---|
| Component | (position in reference) | ID NO: |
| Ad50 fiber | 1-323 (GenBank accession no. AAW33547) | 239 |
| Ad50 fiber | 43-133 (GenBank accession no. AAW33547) | 240 |
| shaft | | |
| Ad50 fiber | 134-323 (GenBank accession no. AAW33547) | 241 |
| knob | | |
| Ad50 penton | 1-560 (GenBank accession no. AAW33525) | 242 |
| Ad50 hexon | 1-940 (GenBank accession no. AAW33530) | 243 |
| Ad50 fiber | 1-42 (GenBank accession no. AAW33547) | 244 |
| tail | | |

TABLE 18
Ad35 Genomic Sequences
Ad35 Genomic Sequences
Reference Ad35 Genome Sequence: GenBank
accession no. AY128640 (SEQ ID NO: 271)

| | Exemplary Sequence | SEQ |
|---|---|---|
| Component | (position in reference) | ID NO: |
| Ad35 5′ (left) ITR | 1-137 | 245 |
| Ad35 3′ (right) ITR | 34658-34794 | 246 |
| Ad35 Packaging Sequence | 138-479 | 247 |
| Ad35 E1 | 480-3400 | 248 |
| Ad35 E2 | 3966-23415 | 249 |
| Ad35 E3 | 27198-30622 | 250 |
| Ad35 fiber | 30826-31797 | 251 |
| Ad35 fiber tail | 30826-30951 | 252 |
| Ad35 fiber shaft | 30952-31224 | 253 |
| Ad35 fiber knob | 31225-31797 | 254 |
| Ad35 penton | 13690-15375 | 255 |
| Ad35 hexon | 18255-21113 | 256 |

TABLE 19
Ad35 Amino Acid Sequences
Ad35 Amino Acid Sequences

| | Exemplary Sequence | SEQ |
|---|---|---|
| Component | (position in reference) | ID NO: |
| Ad35 fiber | 1-323 (NCBI accession no. AP_000601) | 257 |
| Ad35 fiber | 43-133 (NCBI accession no. AP_000601) | 258 |
| shaft | | |
| Ad35 fiber | 134-323 (NCBI accession no. AP_000601) | 259 |
| knob | | |
| Ad35 penton | 1-561 (NCBI accession no. AP_000580) | 260 |
| Ad35 hexon | 1-952 (NCBI accession no. AP_000585) | 261 |
| Ad35 fiber | 1-42 (NCBI accession no. AP_000601) | 262 |
| tail | | |

TABLE 20
Predicted translational features of the Ad35 genome

| Features | From | To |
|---|---|---|
| 5′ (left) ITR | 1 | 137 |
| Packaging Sequence | 138 | 479 |

E1 and pIX regions (E1: 480-3400)

| | | | |
|---|---|---|---|
| E1A 261R | | 569 | 1148 |
| | Join* | 1233 | 1441 |
| E1A 230R | | 569 | 1055 |
| | Join | 1233 | 1441 |
| E1A 58R | | 569 | 640 |
| | Join | 1233 | 1337 |
| EIB 214R (small T antigen) | | 1611 | 2153 |
| EIB 494R (large T antigen) | | 1916 | 3400 |
| pIX | | 3484 | 3903 |
| ORF-1 | | 2366 | 2689 |

E2 and IVa2 regions (complementary strand) (E2: 3966-23415)

| | | | |
|---|---|---|---|
| IVa2 | | 5579 | 5590 |
| | Join | 3966 | 5300 |
| E2B DNA pol | | 5069 | 8437 |
| E2B pTP | | 8440 | 10 356 |
| E2A DBP | | 22 414 | 23 415 |
| ORF-2 | | 5988 | 6482 |
| ORF-3 | | 7847 | 8257 |
| ORF-4 | | 15 663 | 15 971 |
| ORF-5 | | 15 743 | 16 216 |
| ORF-6 | | 16 457 | 17 041 |
| ORF-7 | | 17 543 | 17 938 |
| ORF-8 | | 17 994 | 18 713 |
| ORF-9 | | 21 858 | 22 436 |
| ORF-10 | | 22 128 | 22 502 |
| ORF-11 | | 23 027 | 23 488 |

E3 region (E3: 27198-30622)

| | | |
|---|---|---|
| E3 12.2K protein | 27 198 | 27 515 |
| E3 15.0K protein | 27 469 | 27 864 |
| E3 18.5K protein | 27 849 | 28 349 |
| E3 20.3K protein | 28 369 | 28 914 |
| E3 20.6K protein | 28 932 | 29 495 |
| E3 15.2K protein | 29 817 | 30 221 |
| E3 15.3K protein | 30 214 | 30 621 |
| ORF-12 | 25 693 | 26 019 |
| ORF-13 | 27 908 | 28 240 |

E4 region (complementary strand)

| | | |
|---|---|---|
| E4 299R | 32 075 | 32 974 |
| E4 145R | 33 604 | 34 041 |
| E4 125R | 34 038 | 34 415 |
| E4 117R | 33 254 | 33 607 |
| E4 122R | 32 877 | 33 245 |
| ORF-14 | 33 100 | 33 609 |
| VARNA region | 10 433 | 10 594 |

L region

| | | | |
|---|---|---|---|
| L1 52, 5SK | | 10 653 | 11 819 |
| L1 IIIa | | 11 845 | 13 608 |
| L2 III (penton) | | 13 690 | 15 375 |
| L2 pVII | | 15 383 | 15 961 |
| L2 V | | 16 004 | 17 059 |
| L3 pVI | | 17 399 | 18 139 |
| L3 II (hexon) | | 18 255 | 21 113 |
| L3 23K (protease) | | 21 150 | 21 779 |
| L4 100K | | 23 446 | 25 884 |
| L4 22K | | 25 616 | 26 191 |
| L4 33K | | 25 616 | 25 934 |
| | Join | 26 104 | 26 465 |
| L4 pVIII | | 26 515 | 27 198 |
| L5 IV(fiber) | | 30 826 | 31 797 |
| Fiber Tail | | 30826 | 30951 |
| Fiber Knob | | 30952 | 31224 |
| Fiber Shaft | | 31225 | 31797 |
| 3′ (right) ITR | | 34658 | 34794 |

*“Join” indicates that corresponding mRNA sequences are joined by splicing

[0138] Another example of an Ad7 reference genome can include NCBI accession no. AC_000018 (SEQ ID NO: 272). In some embodiments, an Ad7 5′ (left) ITR corresponds to positions 1-136 in NCBI accession no. AC_000018 (SEQ ID NO: 273). In some embodiments, an Ad7 3′ (right) ITR corresponds to positions 35379-35514 in NCBI accession no. AC_000018 (SEQ ID NO: 274). In some embodiments, an Ad7 Packaging Sequence corresponds to positions 137-479 in NCBI accession no. AC_000018 (SEQ ID NO: 275). In some embodiments, an Ad7 E1 corresponds to positions 480-3919 in NCBI accession no. AC 000018 (SEQ ID NO: 276). In some embodiments, an Ad7 E2 corresponds to positions 26867-3947 in NCBI accession no. AC_000018 (SEQ ID NO: 277). In some embodiments, an Ad7 E3 corresponds to positions 27308-31345 in NCBI accession no. AC_000018 (SEQ ID NO: 278). In some embodiments, an Ad7 fiber corresponds to positions 31529-32506 in NCBI accession no. AC_000018 (SEQ ID NO: 279). In some embodiments, an Ad7 fiber tail corresponds to positions 31529-31654 in NCBI accession no. AC_000018 (SEQ ID NO: 280). In some embodiments, an Ad7 fiber shaft corresponds to positions 31655-31927 in NCBI accession no. AC_000018 (SEQ ID NO: 281). In some embodiments, an Ad7 fiber knob corresponds to positions 31928-32503 in NCBI accession no. AC_000018 (SEQ ID NO: 282). In some embodiments, an Ad7 penton corresponds to positions 14153-15787 in NCBI accession no. AC_000018 (SEQ ID NO: 283). In some embodiments, an Ad7 hexon corresponds to positions 18666-21470 in NCBI accession no. AC_000018 (SEQ ID NO: 284).

[0139] Another example of an Ad35 reference genome can include NCBI accession no. AC_000019 (SEQ ID NO: 285). In some embodiments, an Ad35 5′ (left) ITR corresponds to positions 1-137 in NCBI accession no. AC_000019 (SEQ ID NO: 286). In some embodiments, an Ad35 3′ (right) ITR corresponds to positions 34658-34794 in NCBI accession no. AC_000019 (SEQ ID NO: 287). In some embodiments, an Ad35 Packaging Sequence corresponds to positions 138-479 in NCBI accession no. AC_000019 (SEQ ID NO: 288). In some embodiments, an Ad35 E1 corresponds to positions 480-3400 in NCBI accession no. AC_000019 (SEQ ID NO: 289). In some embodiments, an Ad35 E2 corresponds to positions 3966-23416 in NCBI accession no. AC_000019 (SEQ ID NO: 290). In some embodiments, an Ad35 E3 corresponds to positions 27199-30622 in NCBI accession no. AC_000019 (SEQ ID NO: 291). In some embodiments, an Ad35 fiber corresponds to positions 30827-31798 in NCBI accession no. AC_000019 (SEQ ID NO: 292). In some embodiments, an Ad35 fiber tail corresponds to positions 30827-30952 in NCBI accession no. AC_000019 (SEQ ID NO: 293). In some embodiments, an Ad35 fiber shaft corresponds to positions 30953-31225 in NCBI accession no. AC_000019 (SEQ ID NO: 294). In some embodiments, an Ad35 fiber knob corresponds to positions 31226-31798 in NCBI accession no. AC_000019 (SEQ ID NO: 295). In some embodiments, an Ad35 penton corresponds to positions 13690-15375 in NCBI accession no. AC_000019 (SEQ ID NO: 296). In some embodiments, an Ad35 hexon corresponds to positions 18257-21115 in NCBI accession no. AC_000019 (SEQ ID NO: 297).

[0140] Ad3, Ad7, Ad11, Ad14, Ad16, Ad21, Ad34, and Ad50 genomes and vectors can be engineered for therapeutic use. One goal of certain such engineering can include rendering viral genomes and vectors deficient for propagation in a recipient cell or system, such as a human subject. Propagation deficiency increases the safety of administering the viral genome or vector to the recipient cell or system. Broadly, there are three recognized “generations” of adenoviral vectors and genomes engineered to reduce and/or eliminate replication of the virus in recipients. First-generation adenoviral vectors are engineered to remove genes E1 and E3. Without these genes, adenoviral vectors cannot replicate on their own but can be produced in E1-expressing mammalian cell lines (e.g., HEK293 cells). With only first-generation modifications, adenoviral vector cloning capacity is limited, and host immune response against the vector can be problematic for effective payload expression. Second-generation adenoviral vectors, in addition to E1/E3 removal, are engineered to remove non-structural genes E2 and E4, resulting in increased capacity and reduced immunogenicity. Third-generation adenoviral vectors (also referred to as gutless, high capacity adenoviral vectors, or helper-dependent adenoviral (HDAd) vectors) are engineered to remove all viral coding sequences, but retain the ITRs of the genome and a packaging sequence of the genome. HDAd genomes are helper-dependent because they do not encode proteins necessary for viral production: a helper-dependent genome can only be packaged into a vector if they are present in a cell that includes a nucleic acid sequence that provides viral proteins in trans. These helper-dependent vectors are also characterized by still greater capacity and further decreased immunogenicity. By deleting the viral coding sequences and leaving only the cis-acting elements necessary for genome replication (ITRs) and packaging, cellular immune response against the Ad vector is reduced. Helper-dependent adenoviral vectors (HDAd) engineered to lack all viral coding sequences can efficiently transduce a wide variety of cell types, and can mediate long-term transgene expression with negligible chronic toxicity. HDAd vectors have a large cloning capacity of up to, e.g., 37 kb, allowing for the delivery of large payloads. These payloads can include large therapeutic genes or even multiple transgenes and large regulatory components to enhance, prolong, and regulate transgene expression. In various embodiments, retained portions of the reference genome can be identical in sequence to corresponding sequences of a reference genome or can have less than 100% identity with a reference genome, e.g., at least 99%, 98%, 97%, 96%, 95%, 90%, 85%, 80%, or 75% identity. Accordingly, as will be appreciated by those of skill in the art, a helper-dependent genome includes 5′ and 3′ ITRs of a particular same serotype, a packaging sequence positioned in the 5′ portion of the helper-dependent adenoviral genome with the 5′ ITR (e.g. within 1 kb of, within 500 bp of, within 250 bp of, within 100 bp of, within 50 bp of, or adjacent to the 5′ ITR), a nucleic acid payload (also referred to herein as a payload), and optionally a stuffer

[0141] Various serotype genomes and exemplary components such as ITRs and packaging sequences are exemplified by and can be selected from those described elsewhere herein, excluding conditional forms of packaging sequences. For example, ITRs of a helper-dependent adenoviral genome can be ITRs of an Ad3, Ad7, Ad11, Ad14, Ad16, Ad21, Ad34, or Ad50 genome (e.g., a 5′ ITR according to SEQ ID NOs: 101, 119, 137, 155, 173, 191, 209, or 227, and a 3′ ITR according to SEQ ID NOs: 102, 120, 138, 156, 174, 192, 210, or 228), or ITRs that individually and/or together have at least 75% sequence identity (e.g., at least 75%, 80%, 85%, 90%, 95%, 96%, 97%, 98%, 99%, or 100% identity) thereto. For example, a packaging sequence of a helper-dependent adenoviral genome can be a packaging sequence of an Ad3, Ad7, Ad11, Ad14, Ad16, Ad21, Ad34, or Ad50 vector (e.g., a packaging sequence according to SEQ ID NOs: 103, 121, 139, 157, 175, 193, 211, or 229), or a packaging sequence having at least 75% sequence identity (e.g., at least 75%, 80%, 85%, 90%, 95%, 96%, 97%, 98%, 99%, or 100% identity) to the entirety or a portion thereof (e.g., at least 75%, 80%, 85%, 90%, 95%, 96%, 97%, 98%, 99%, or 100% thereof).

[0142] As disclosed herein, a nucleic acid payload is an engineered nucleic acid that includes one or more nucleic acid sequences that include, encode, and/or express at least one agent that achieves a desired result (e.g., that contributes to a therapeutic goal). Embodiments of the present disclosure can include a wide variety of nucleic acid payloads. Those of skill in the art will appreciate that any nucleic acid payloads capable of use in a vector of acceptable length can be used in methods and compositions of the present disclosure. Accordingly, nucleic acid payloads of the present disclosure can encode and/or express a wide variety of expression products. A nucleic acid payload can include any of one or more coding sequences that encode one or more expression products, one or more regulatory sequences operably linked to a coding sequence, one or more stuffer sequences, and the like. Without wishing to be bound by any particular nucleic acid payload, exemplary nucleic acid payloads can be engineered in order to achieve a desired result such as a therapeutic effect in a host cell or system, e.g., expression of a protein of therapeutic interest or of expression of a gene editing system, e.g., a CRISPR/Cas system, base editing system, or prime editing system to generate a sequence modification of therapeutic interest, e.g., to correct a nucleic acid lesion.

[0143] Nucleic acid payloads of the present disclosure can include a gene. A gene can include not only coding sequences but also regulatory regions such as promoters, enhancers, termination regions, locus control regions (LCRs), termination and polyadenylation signal elements, splicing signal elements, silencers, insulators, and the like. A gene can include introns and other DNA sequences spliced from an expressed mRNA transcript, along with variants resulting from alternative splice sites. Coding sequences can also include alternative synonymous codon usage as compared to a reference sequence, e.g., codon usage modified as compared to a reference in accordance with codon preference of a specific organism or target cell type.

[0144] A nucleic acid payload can include a single gene or multiple genes. A payload can include a single coding sequence or a plurality of coding sequences. A payload can include a single regulatory sequence or a plurality of regulatory sequences. A payload can include a plurality of coding sequences where the individual expression products of the coding sequences function together, e.g., as in the case of an editing enzyme and guide RNA of an editing system, or independently, e.g., as two separate proteins that do not directly or indirectly bind. As will be appreciated by those of skill in the art, a payload or payload component (e.g., a coding sequence and/or regulatory sequence) that is not naturally and/or endogenously encoded by a vector, host cell, and/or target cell can be referred to herein as heterologous. A payload expression product (e.g., an editing enzyme or other polypeptide or guide RNA encoded by a nucleic acid payload) that is not naturally and/or endogenously encoded and/or expressed by a vector, host cell, and/or target cell can be referred to herein as heterologous.

[0145] A nucleic acid payload of the present disclosure can include one or more sequences that encode and/or express any of a variety of expression products. Exemplary payload expression products include proteins, including without limitation replacement therapy proteins for treatment of diseases or conditions characterized by low expression or activity of a biologically active protein as compared to a reference level. Exemplary expression products include CRISPR/Cas, base editor, and prime editor systems (e.g., for one or more therapeutic purposes such as repairing a genetic lesion or abnormality and/or treating a disease, disorder, or condition). Exemplary expression products include antibodies, CARs, and TCRs. Exemplary expression products include small RNAs. In embodiments in which a nucleic acid sequence encodes one or more therapeutic proteins, a nucleic acid sequence encoding the therapeutic protein may be found in the art and/or readily derived from or generated based on the relevant amino acid sequence. In various embodiments, a coding sequence can be codon optimized for expression in mammalian cells (e.g., human cells). A nucleic acid sequence such as a nucleic acid payload, or a portion thereof that encodes one or more expression products or includes one or more genes, can include one or more restriction enzyme sites at the 5′ and/or 3′ ends as a means for isolating the nucleic acid sequence from a particular nucleic acid context and/or positioning the nucleic acid sequence within another nucleic acid context.

[0146] In various embodiments, integration of all or a portion of a nucleic acid payload into a host cell genome is not required in order for delivery to the host cell to produce an intended or target effect, e.g., in certain instances in which the intended or target effect includes editing of the host cell genome by a CRISPR, base editor, or prime editor system. In various embodiments, integration of all or a portion of a nucleic acid payload is required or preferred in order for delivery a nucleic acid payload to produce an intended or target effect, e.g., where expression of a payload-encoded expression product is desired in progeny cells of a transduced target cell. In various embodiments, a nucleic acid payload can include a nucleic acid sequence engineered for integration into a host cell genome (an “integrating fragment”), e.g., by recombination or transposition.

[0147] Particular examples of payload expression products include γ-globin, Factor VIII, YC, JAK3, IL7RA, RAG1, RAG2, DCLRE1C, PRKDC, LIG4, NHEJ1, CD3D, CD3E, CD3Z, CD3G, PTPRC, ZAP70, LCK, AK2, ADA, PNP, WHN, CHD7, ORAI1, STIM1, CORO1A, CIITA, RFXANK, RFX5, RFXAP, RMRP, DKC1, TERT, TINF2, DCLRE1B, SLC46A1, a FANC family gene (e.g., FancA, FancB, FancC, FancD1 (BRCA2), FancD2, FancE, FancF, FancG, FancI, FancJ (BRIP1), FancL, FancM, FancN (PALB2), FancO (RAD51C), FancP (SLX4), FancQ (ERCC4), FancR (RAD51), FancS (BRCA1), FancT (UBE2T), FancU (XRCC2), FancV (MAD2L2), and FancW (RFWD3)), soluble CD40, CTLA, Fas L, an antibody (e.g., that specifically binds CD4, CD5, CD7, CD52, IL1, IL2, IL6, TNF, P53, PTPN22, or DRB1*1501/DQB1*0602), an antibody to TCR specifically present on autoreactive T cells, IL4, IL10, IL12, IL13, IL1Ra, sIL1RI, SIL1RII, STNFRI, sTNFRII, globin family genes, WAS, phox, dystrophin, pyruvate kinase, CLN3, ABCD1, arylsulfatase A, SFTPB, SFTPC, NLX2.1, ABCA3, GATA1, ribosomal protein genes, TERT, TERC, DKC1, TINF2, CFTR, LRRK2, PARK2, PARK7, PINK1, SNCA, PSEN1, PSEN2, APP, SOD1, TDP43, FUS, ubiquilin 2, C9ORF72, and other payload expression products described herein.

[0148] A therapeutic payload expression product can be selected to provide a therapeutically effective response against diseases related to red blood cells and clotting. In particular embodiments, the disease is a hemoglobinopathy like thalassemia, or a sickle cell disease/trait. A payload expression product may be, for example, an expression product that induces or increases production of hemoglobin; induces or increases production of β-globin, γ-globin, or α-globin, or increases the availability of oxygen to cells in the body. A payload expression product can be, for example, HBB or CYB5R3. Exemplary effective treatments may, for example, increase blood cell counts, improve blood cell function, or increase oxygenation of cells in patients. In another particular embodiment, the disease is hemophilia. A payload expression product can be, for example, an expression product that increases the production of coagulation/clotting factor VIII or coagulation/clotting factor IX, causes the production of normal versions of coagulation factor VIII or coagulation factor IX, a gene that reduces the production of antibodies to coagulation/clotting factor VIII or coagulation/clotting factor IX, or a gene that causes the proper formation of blood clots. Exemplary payload expression products include F8 and F9. Exemplary effective treatments may, for example, increase or induce the production of coagulation/clotting factors VIII and IX; improve the functioning of coagulation/clotting factors VIII and IX, or reduce clotting time in subjects.

[0149] In various embodiments of the present disclosure, a nucleic acid payload encodes a globin gene, wherein the globin protein encoded by the globin gene is selected from a γ-globin, a β-globin, and/or an α-globin. Globin genes of the present disclosure can include, e.g., one or more regulatory sequences such as a promoter operably linked to a nucleic acid sequence encoding a globin protein. As those of skill in the art will appreciate, each of γ-globin, β-globin, and/or α-globin is a component of fetal and/or adult hemoglobin and is therefore useful to express in various methods and compositions disclosed herein, e.g., for treatment of a subject in need thereof.

[0150] In various embodiments, increasing expression of a globin protein can refer to any of one or more of (i) increasing the amount, concentration, or expression (e.g., transcription or translation of nucleic acids encoding) in a cell or system of globin protein having a particular sequence; (ii) increasing the amount, concentration, or expression (e.g., transcription or translation of nucleic acids encoding) in a cell or system of globin protein of a particular type (e.g., the total amount of all proteins that would be identified as γ-globin (or alternatively β-globin or α-globin) by those of skill in the art or as set forth in the present specification) without respect to the sequences of the proteins relative to each other; and/or (iii) expressing in a cell or system a heterologous globin protein, e.g., a globin protein not encoded by a host cell prior to gene therapy.

[0151] The following references describe particular exemplary sequences of functional globin genes. References 1-4 relate to α-type globin sequences and references 4-12 relate to β-type globin sequences (including β and γ globin sequences), which sequences are hereby incorporated by reference: (1) GenBank accession no. Z84721 (Mar. 19, 1997); (2) NCBI accession no. NM_000517 (Oct. 31, 2000); (3) Hardison et al., J. Mol. Biol. (1991) 222(2):233-249; (4) A Syllabus of Human Hemoglobin Variants (1996), by Titus et al., published by The Sickle Cell Anemia Foundation in Augusta, Ga. (available online at globin.cse.psu.edu); (5) GenBank accession no. J00179 (Aug. 26, 1993) or U01317.1; (6) Tagle et al., Genomics (1992) 13(3):741-760; (7) Grovsfeld et al., Cell (1987) 51(6):975-985; (8) Li et al., Blood (1999) 93(7):2208-2216; (9) Gorman et al., J. Biol. Chem. (2000) 275(46):35914-35919; (10) Slightom et al., Cell (1980) 21(3):627-638; (11) Fritsch et al., Cell (1980) 19(4):959-972; (12) Marotta et al., J. Biol. Chem. (1977) 252(14):5040-5053. For additional coding and non-coding regions of genes encoding globins see, for example, by Marotta et al., Prog. Nucleic Acid Res. Mol. Biol. 19, 165-175, 1976, Lawn et al., Cell 21 (3), 647-651, 1980, and Sadelain et al., PNAS; 92:6728-6732, 1995. In some embodiments, a globin gene encodes a G16D gamma globin variant.

[0152] An exemplary amino acid sequence of hemoglobin subunit β is provided, for example, at UniProt accession no. P68871. An exemplary amino acid sequence for β-globin is provided, for example, at NCBI accession no. NP_000509.

[0153] Nucleic acid payloads can also encode therapeutic molecules such as checkpoint inhibitor reagents, chimeric antigen receptors (e.g., chimeric antigen receptors specific to one or more cancer antigens), and/or T-cell receptors (e.g., T-cell receptors specific to one or more cancer antigens).

[0154] As another example, a payload expression product can be selected to provide a therapeutically effective response against a lysosomal storage disorder. In particular embodiments, the lysosomal storage disorder is mucopolysaccharidosis (MPS), type I; MPS II or Hunter Syndrome; MPS III or Sanfilippo syndrome; MPS IV or Morquio syndrome; MPS V; MPS VI or Maroteaux-Lamy syndrome; MPS VII or sly syndrome; α-mannosidosis; β-mannosidosis; glycogen storage disease type I, also known as GSDI, von Gierke disease, or Tay Sachs; Pompe disease; Gaucher disease; or Fabry disease. A payload expression product can be, for example, an agent that induces production of an enzyme, or that otherwise causes degradation of mucopolysaccharides in lysosomes. Exemplary payload expression products can include IDUA or iduronidase, IDS, GNS, HGSNAT, SGSH, NAGLU, GUSB, GALNS, GLB1, ARSB, and HYAL1. Therapeutic nucleic acid payloads for lysosomal storage disorders may, for example, encode or induce the production of enzymes responsible for the degradation of various substances in lysosomes; reduce, eliminate, prevent, or delay the swelling in various organs, including the head (e.g., Macrocephaly), the liver, spleen, tongue, or vocal cords; reduce fluid in the brain; reduce heart valve abnormalities; prevent or dilate narrowing airways and prevent related upper respiratory conditions like infections and sleep apnea; reduce, eliminate, prevent, or delay the destruction of neurons, and/or the associated symptoms.

[0155] As another example, a payload expression product can be can be selected to provide a therapeutically effective response against a hyperproliferative disease. In particular embodiments, the hyperproliferative disease is cancer. A payload expression product can be, for example, a tumor suppressor, an agent that induces apoptosis, an enzyme, a gene or polypeptide encoding an antibody, or polypeptide hormone. Exemplary payload expression products can include (in addition to those listed elsewhere herein) 101F6, 123F2 (RASSF1), 53BP2, abl, ABLI, ADP, aFGF, APC, ApoAI, ApoAIV, ApoE, ATM, BAI-1, BDNF, Beta*(BLU), bFGF, BLC1, BLC6, BRCA1, BRCA2, CBFA1, CBL, C-CAM, CNTF, COX-1, CSFIR, CTS-1, cytosine deaminase, DBCCR-1, DCC, Dp, DPC-4, ELA, E2F, EBRB2, erb, ERBA, ERBB, ETS1, ETS2, ETV6, Fab, FCC, FGF, FGR, FHIT, fms, FOX, FUS1, FYN, G-CSF, GDAIF, Gene 21 (NPRL2), Gene 26 (CACNA2D2), GM-CSF, GMF, gsp, HCR, HIC-1, HRAS, hst, IGF, IL-1, IL-2, IL-3, IL-5, IL-6, IL-7, IL-8, IL-9, IL-11, ING1, interferon α, interferon β, interferon γ, IRF-1, JUN, KRAS, LUCA-1 (HYAL1), LUCA-2 (HYAL2), LYN, MADH4, MADR2, MCC, mda7, MDM2, MEN-I, MEN-II, MLL, MMAC1, MYB, MYC, MYCL1, MYCN, neu, NF-1, NF-2, NGF, NOEY1, NOEY2, NRAS, NT3, NT5, OVCA1, p16, p21, p27, p57, p73, p300, PGS, PIM1, PL6, PML, PTEN, raf, Rap1A, ras, Rb, RB1, RET, rks-3, ScFv, scFV ras, SEM A3, SRC, TALI, TCL3, TFPI, thrombospondin, thymidine kinase, TNF, TP53, trk, T-VEC, VEGF, VHL, WT1, WT-1, YES, and zac1. Exemplary effective genetic therapies may suppress or eliminate tumors, result in a decreased number of cancer cells, reduced tumor size, slow or eliminate tumor growth, or alleviate symptoms caused by tumors.

[0156] A payload expression product can be, for example, an agent useful for immune reconstitution, fighting infection (e.g., an antigen of an infectious agent, a receptor, a coreceptor, a receptor ligand, or a coreceptor ligand). Exemplary payload expression product can include α2β1; αvβ3; αvβ5; αvβ63; BOB/GPR15; Bonzo/STRL-33/TYMSTR; CCR2; CCR3; CCR5; CCR8; CD4; CD46; CD55; CXCR4; aminopeptidase-N; HHV-7; ICAM; ICAM-1; PRR2/HveB; HveA; α-dystroglycan; LDLR/α2MR/LRP; PVR; PRR1/HveC; and laminin receptor. As another example, a payload expression product can be selected to provide a therapeutically effective response against an infectious disease.

[0157] In various embodiments, a payload of the present disclosure encodes and/or expresses at least one component, or all components, of a gene editing system. Gene editing systems of the present disclosure include base editing systems, prime editing systems, CRISPR systems, zinc finger nucleases, and TALENs. Certain gene editing systems can include a plurality of components including a gene editing enzyme selected from a CRISPR-associated RNA-guided endonuclease, a base editing enzyme, and a prime editing enzyme, optionally in combination with at least one gRNA. Accordingly, gene editing systems of the present disclosure can include either (i) in the case of a CRISPR system, a CRISPR enzyme that is a CRISPR-associated RNA-guided endonuclease and at least one guide RNA (gRNA), (ii) in the case of a base editing system, a base editing enzyme and at least one gRNA, or (iii) in the case of a prime editing system and at least one prime editing gRNA. In certain embodiments, a gene editing system can include engineered zinc finger nucleases (ZFN). For instance, a ZFN is an artificial endonuclease that consists of a designed zinc finger protein (ZFP) fused to the cleavage domain of the FokI restriction enzyme. A ZFN may be redesigned to cleave new targets by developing ZFPs with new sequence specificities. For genome engineering, a ZFN is targeted to cleave a chosen genomic sequence. The cleavage event induced by the ZFN provokes cellular repair processes that in turn mediate efficient modification of the targeted locus. If the ZFN-induced cleavage event is resolved via non-homologous end joining, this can result in small deletions or insertions, effectively leading to gene knockout. If the break is resolved via a homology-based process in the presence of an investigator-provided donor, small changes or entire transgenes can be transferred, often without selection, into the chromosome, which can be referred to as ‘gene correction’ and ‘gene addition,’ respectively.

[0158] In some embodiments a gene editing system (e.g., a CRISPR system, base editing system, or prime editing system) is engineered to modify a nucleic acid sequence that encodes γ-globin, e.g., to increase expression of γ-globin. The main fetal form of hemoglobin, hemoglobin F (HbF) is formed by pairing of γ-globin polypeptide subunits with α-globin polypeptide subunits. Human fetal γ-globin genes (HBG1 and HBG2, two highly homologous genes produced by evolutionary duplication) are ordinarily silenced around birth, while expression of adult β-globin gene expression (HBB and HBD) increases. Mutations that cause or permit persistent expression of fetal γ-globin throughout life can ameliorate phenotypes of β-globin deficiencies. Thus, reactivation of fetal γ-globin genes can be therapeutically beneficial, particularly in subjects with β-globin deficiency. A variety of mutations that cause increased expression of γ-globin are known in the art (see, e.g., Wienert, Trends in Genetics 34(12): 927-940, 2018, which is incorporated herein by reference in its entirety and with respect to mutations that increase expression of γ-globin). Certain such mutations are found in the HBG1 promoter or HBG2 promoter.

[0159] In various embodiments, a gene editing system designed to increase expression of γ-globin includes an HBG1/2 promoter-targeted gRNA that is designed to increase expression of γ-globin by modification and/or inactivation of a BCL11A repressor protein binding site. In various embodiments, a gene editing system designed to increase expression of γ-globin includes a bcl11a-targeted gRNA that is designed to increase expression of γ-globin by modification and/or inactivation of the erythroid bcl11a enhancer to reduce BCL11A repressor protein expression in erythroid cells. In various embodiments, a gene editing system designed to increase expression of γ-globin includes a gRNA targeted to cause a loss of function mutation in the gene encoding BCL11A.

[0160] Ad3, Ad7, Ad11, Ad14, Ad16, Ad21, Ad34, and Ad50 genomes can include a sequence including a restriction enzyme site. In various embodiments, the restriction enzyme site is an I-SceI site having a nucleotide sequence of 18 base pairs (TAGGGATAACAGGGTAAT) (SEQ ID NO: 29). In various embodiments, a sequence including a restriction enzyme site (e.g., an I-SceI site) can be inserted at a position in a reference Ad3, Ad7, Ad11, Ad14, Ad16, Ad21, Ad34, and Ad50 genome sequence. In various embodiments, a sequence including a restriction enzyme site (e.g., an I-SceI site) can be used in place of a canonical sequence in a reference Ad3, Ad7, Ad11, Ad14, Ad16, Ad21, Ad34, and Ad50 genome sequence. In various embodiments, the canonical sequence is the same number of nucleotides in length as the sequence including the restriction enzyme site (e.g., an I-SceI site). In various embodiments, the canonical sequence is a different number of nucleotides in length (e.g., greater or fewer) compared to the sequence including the restriction enzyme site (e.g., an I-SceI site). In various embodiments, a sequence including a restriction enzyme site (e.g., an I-SceI site) can be used in place of a canonical sequence at positions 483-500 of a reference Ad3 genome sequence. In various embodiments, a sequence including a restriction enzyme site (e.g., an I-SceI site) can be used in place of a canonical sequence at positions 483-500 of a reference Ad7 genome sequence. In various embodiments, a sequence including a restriction enzyme site (e.g., an I-SceI site) can be used in place of a canonical sequence at positions 481-498 of a reference Ad11 genome sequence. In various embodiments, a sequence including a restriction enzyme site (e.g., an I-SceI site) can be used in place of a canonical sequence at positions 481-498 of a reference Ad14 genome sequence. In various embodiments, a sequence including a restriction enzyme site (e.g., an I-SceI site) can be used in place of a canonical sequence at positions 481-498 of a reference Ad16 genome sequence. In various embodiments, a sequence including a restriction enzyme site (e.g., an I-SceI site) can be used in place of a canonical sequence at positions 481-498 of a reference Ad21 genome sequence. In various embodiments, a sequence including a restriction enzyme site (e.g., an I-SceI site) can be used in place of a canonical sequence at positions 481-498 of a reference Ad34 genome sequence. In various embodiments, a sequence including a restriction enzyme site (e.g., an I-SceI site) can be used in place of a canonical sequence at positions 480-497 of a reference Ad50 genome sequence.

[0161] Because HDAd vectors do not encode the viral proteins required to produce viral particles, viral proteins must be provided in trans, e.g., expressed in and/or by cells in which the HDAd genome is present. In some HDAd vector systems, one viral genome (a helper genome) encodes some or all of the proteins (e.g., all of the structural viral proteins) required for vector production but has a conditional defect in its packaging sequence, making the helper genome less likely to be packaged into a vector under certain vector production conditions (e.g., under conditions that, and/or in the presence of an agent that, reduces function of the conditionally defective packaging sequence). Thus, in various embodiments, an HDAd donor viral genome includes (e.g., only includes) Ad ITRs, a payload (e.g., a therapeutic payload), and a functional packaging sequence (e.g., a wild-type packaging sequence or a functional fragment thereof), which allows the HDAd donor genome to be selectively packaged into HDAd vectors produced from structural components expressed from the helper genome that has a conditional packaging defect. In other words, Ad3, Ad7, Ad11, Ad14, Ad16, Ad21, Ad34, and Ad50 helper vectors and genomes can be used for production of Ad3, Ad7, Ad11, Ad14, Ad16, Ad21, Ad34, and Ad50 donor vectors, respectively.

[0162] In some HDAd vector systems, a helper genome utilizes a recombinase system (e.g., a Cre/loxP system) for conditional packaging. In certain such HDAd vector systems, a helper genome can include a packaging sequence (e.g., a complete packaging sequence or a functional fragment thereof (e.g., a fragment of the packaging sequence that is sufficient for packaging, required for packaging, or required for efficient packaging of the Ad genome into the capsid)) flanked by recombinase (e.g., loxP) sites so that contact with a corresponding recombinase (e.g., Cre recombinase) excises the packaging sequence from the helper genome by recombinase-mediated (e.g., Cre-mediated) site-specific recombination between the recombinase sites (e.g., loxP sites). The present disclosure includes, among other things, Ad3, Ad7, Ad11, Ad14, Ad16, Ad21, Ad34, and Ad50 helper vectors and genomes that include two recombinase sites that flank a packaging sequence, where the two recombinase sites are sites corresponding to (i.e., for, or acted upon by) the same recombinase. In various embodiments, a packaging sequence refers to the portion of a helper genome positioned between two recombinase sites as set forth herein, e.g., between the positions at which first and second recombinase sites are inserted or positioned in a helper genome.

[0163] Similar HDAd production systems have been developed using FLP (e.g., FLPe)/frt site-specific recombination, where FLP-mediated recombination between frt sites flanking the packaging sequence of the helper genome reduces or eliminates packaging of helper genomes in producer cells that express FLP.

[0164] Thus, examples of recombinase systems include the Flp/Frt system and Cre/loxP system, as well as others such as the Dre/rox system, the Vika/vox system, and the PhiC31 system. Cre is a site-specific DNA recombinase derived from bacteriophage P1 sequences. The Cre/loxP system is described in, for example, EP 02200009B1. Cre/loxP systems can include both canonical loxP sites and/or canonical Cre recombinase and/or variations of one or both. The recognition site of Cre protein is typically a nucleotide sequence of 34 base pairs (ATAACTTCGTATAATGTATGCTATACGAAGTTAT) (SEQ ID NO: 1), referred to as a loxP site. Variants of the lox recognition site that can be used include: lox2272 (ATAACTTCGTATAAaGTATcCTATACGAAGTTAT) (SEQ ID NO: 2); lox511 (ATAACTTCGTATAATGTATaCTATACGAAGTTAT) (SEQ ID NO: 3); lox66 (ATAACTTCGTATANNNTANNNTATACGAACGGTA) (SEQ ID NO: 4); lox71 (TACCGTTCGTATANNNTANNNTATACGAAGTTAT) (SEQ ID NO: 5); loxM2 (ATAACTTCGTATAAgaaAccaTATACGAAGTTAT) (SEQ ID NO: 6); loxM3 (ATAACTTCGTATAtaaTACCATATACGAAGTTAT) (SEQ ID NO: 7); loxM7 (ATAACTTCGTATAAgaTAGAATATACGAAGTTAT) (SEQ ID NO: 8); loxM11 (ATAACTTCGTATAcgaTAccaTATACGAAGTTAT) (SEQ ID NO: 9); and lox5171 (ATAACTTCGTATAATGTgTaCTATACGAAGTTAT) (SEQ ID NO: 10). Variants of Cre recombinase are also known and included herein as disclosed, for example, in Eroshenko and Church, Mutants of Cre recombinase with improved accuracy, Nature Communications, 4:2509 (2013), which is incorporated herein by reference in its entirety and in particular with respect to variants of Cre recombinase. The VCre/VloxP recombinase system was derived from Vibrio plasmid p0908. The sCre/SloxP system is described, e.g., in WO 2010/143606. The Flp/Frt DNA recombinase system was derived from Saccharomyces cerevisiae. The Flp/Frt system includes the recombinase Flp (flippase) that catalyzes DNA-recombination on its Frt recognition sites. In various embodiments, an Frt site includes the sequence GAAGTTCCTATTCtctagaaaGtATAGGAACTTC (SEQ ID NO: 11). Variant Frt sites are also included herein. For example, Senecoff et al., (1987) showed that most mutations within the FRT sequence cause minimal effects if present within only one of the two sites. Variants of the Flp protein include GenBank accession no. ABD57356.1 and GenBank accession no. ANW61888.1. The Dre/rox system is described, e.g., in U.S. Pat. Nos. 7,422,889 and 7,915,037B2. It generally includes a Dre recombinase derived from Enterobacteria phage D6 and a rox recognition site. The Vika/vox system is described, e.g., in U.S. Pat. No. 10,253,332. The PhiC31 recombinase recognizes the AttB/AttP binding sites. In various embodiments, a recombinase site of the present disclosure is a sequence that has at least 70% sequence identity (e.g., 70%, 75%, 80%, 95%, 90%, or 95% sequence identity with a sequence selected from SEQ ID NOs: 1-11).

[0165] An Ad3, Ad7, Ad11, Ad14, Ad16, Ad21, Ad34, or Ad50 packaging sequence can include up to five, six, or seven putative “A” repeats. For example, in various embodiments, an Ad3, Ad7, Ad11, Ad14, Ad16, Ad21, Ad34, or Ad50 packaging sequence can include one or more, or all, of AI, AII, AIII, AIV, AV, and/or AVI. In various embodiments, the present disclosure includes a recombinant Ad3, Ad7, Ad11, Ad14, Ad16, Ad21, Ad34, or Ad50 helper vector or genome that includes a packaging sequence flanked by recombinase sites. In various embodiments, an Ad3, Ad7, Ad11, Ad14, Ad16, Ad21, Ad34, or Ad50 packaging sequence refers to a nucleic acid sequence according to SEQ ID NOs: 103, 121, 139, 157, 175, 193, 211, or 229, as provided in Tables 2-17 or a functional fragment thereof (e.g., a fragment that is sufficient for packaging, required for packaging, or required for efficient packaging of the Ad genome into the capsid) (e.g., such that flanking of the packaging sequence with recombinase sites and excision by recombination of the recombinase sites renders the vector or genome deficient for packaging, e.g., by at least 10% as compared to a reference including the packaging sequence, e.g., by at least 10%, 20%, 30%, 40%, 50%, 60%, 70%, 80%, 90%, 91%, 92%, 93%, 94%, 95%, 96%, 97, 98%, 99%, or 100%, optionally wherein the reference includes the packaging sequence flanked by the recombines sites). In various embodiments, a packaging sequence is considered derived from a given serotype when said packaging sequence has at least 80% sequence identity (e.g., at least 80%, 85%, 90%, 95%, 96%, 97%, 98%, or 99% sequence identity) to a packaging sequence of a reference sequence of the same serotype. In various embodiments, an Ad3, Ad7, Ad11, Ad14, Ad16, Ad21, Ad34, or Ad50 packaging sequence includes at least 80 nucleotides (e.g., at least 80, 90, 100, 110, 120, 130, 140, 150, 160, 170, 180, 190, 200, 225, 250, 275, or 300 nucleotides, e.g., a number of nucleotides having a lower bound of 80, 90, 100, 110, 120, 130, 140, or 150 nucleotides and an upper bound of 150, 160, 170, 180, 190, 200, 225, 250, 275, or 300 nucleotides) having at least 80% sequence identity (e.g., at least 80%, 85%, 90%, 95%, 96%, 97%, 98%, or 99% sequence identity) with a corresponding fragment of a nucleic acid sequence according to SEQ ID NOs: 103, 121, 139, 157, 175, 193, 211, or 229, as provided in Tables 2-17. In various embodiments, an adenoviral genome of the present disclosure includes a packaging sequence derived from the same serotype as the 5′ ITR and 3′ ITR of the genome.

[0166] Those of skill in the art will appreciate that the term packaging sequence does not necessarily include all of the packaging elements present in a given vector or genome. For example, a helper genome can include recombinase direct repeats that flank a packaging sequence, where the flanked packaging sequence does not include all of the packaging elements present in the helper genome. Accordingly, in certain embodiments, one or two recombinase direct repeats of a helper genome are positioned within a larger packaging sequence, e.g., such that a larger packaging sequence is rendered noncontiguous by introduction of the one or two recombinase direct repeats. In various embodiments, recombinase direct repeats of a helper genome flank a fragment of the packaging sequence such that excision of the flanked packaging sequence by recombination of the recombinase direct repeats reduces or eliminates (more generally, disrupts) packaging of the helper genome and/or ability of the helper genome to be packaged.

[0167] In some embodiments, to prevent generation of replication competent Ad (RCA) as a consequence of homologous recombination between the helper and HDAd donor genomes present in producer cells, a “stuffer” sequence can be positioned or inserted into the E3 region to render any recombinants too large to be packaged and/or efficiently packaged.

[0168] In some embodiments, production of helper-dependent adenoviral (HDAd) donor vectors can include transfection of a plasmid including the HDAd donor genome and transduction of a helper vector including a helper genome to the same cell, cells, or population of cells. The helper genome can rescue propagation of the HDAd donor vector such that HDAd donor vector can be produced and isolated. In various embodiments, an HDAd donor genome can be delivered to cells that express a recombinase for excision of the conditional packaging sequence of a helper vector (e.g., 293 cells (HEK293) that expresses Cre recombinase), optionally where the HDAd donor genome is delivered to the cells in a non-viral vector form, such as a bacterial plasmid form (e.g., where the HDAd donor genome is present in a bacterial plasmid (pHDAd) and/or is liberated by restriction enzyme digestion). The same cells can be transduced with the helper genome including a packaging sequence flanked by recombinase sites (e.g., loxP sites). Thus, producer cells can be transfected with the HDAd donor genome and transduced with a helper genome bearing a packaging sequence flanked by recombinase sites (e.g., loxP sites), where the cells express a recombinase (e.g., Cre) corresponding to the recombinase sites such that excision of the packaging sequence renders the helper virus genome deficient for packaging (e.g., unpackageable), but still able to provide all of the necessary trans-acting factors for production of HDAd donor vector including the HDAd donor genome. After excision of the packaging sequence, a helper genome is deficient for packaging (e.g., unpackageable) but still able to trans-complement the replication and packaging of the HDAd donor genome. HDAd vectors including the donor genome (e.g., a donor genome including a therapeutic payload) can be isolated from the producer cells. In general, some contamination of helper vectors and/or helper genomes in HDAd viral vectors and HDAd viral vector formulations can occur and can be tolerated. HDAd donor vectors can be further isolated and/or purified of any helper vectors by physical means. Various protocols are known in the art, e.g., at Palmer et al., 2009 Gene Therapy Protocols. Methods in Molecular Biology, Volume 433. Humana Press; Totowa, NJ: 2009. pp. 33-53.

[0169] Because the sequences of each viral genome are distinct at least for each serotype, the placement of recombinase sites to produce a helper viral genome cannot be predicted from available information relating to other serotypes. Tables 21-27 include positions for insertion and/or placement of recombinase sites to flank a packaging sequence for use in Ad3, Ad7, Ad11, Ad14, Ad16, Ad21, Ad34, and Ad50 helper genomes, see also FIG. 1B. Four recombinase site positions (L1, L2, L3, and L4) located 5′ (left) of a packaging sequence are provided in relation to reference Ad3, Ad7, Ad11, Ad14, Ad16, Ad21, Ad34, and Ad50 genomes. Three recombinase site positions (R1, R2, and R3) located 3′ (right) of a packaging sequence are provided in relation to reference Ad3, Ad7, Ad11, Ad14, Ad16, Ad21, Ad34, and Ad50 genomes.

TABLE 21
Recombinase site positions for flanking a packaging sequence

| Serotype | L1 | L2 | L3 | L4 | R1 | R2 | R3 | Reference |
|---|---|---|---|---|---|---|---|---|
| Ad35 | 161 | 171 | 195 | 224 | 402 | 479 | 497 | GenBank accession no. |
| | | | | | | | | AY128640 |
| Ad3 | 163 | 173 | 197 | 227 | 405 | 482 | 500 | NCBI accession no. |
| | | | | | | | | NC_011203 |
| Ad7 | 163 | 173 | 197 | 227 | 405 | 482 | 500 | GenBank accession no. |
| | | | | | | | | AY601634 |
| Ad11 | 161 | 171 | 195 | 223 | 401 | 478 | 498 | NCBI accession no. |
| | | | | | | | | NC_011202 |
| Ad14 | 161 | 171 | 195 | 223 | 419 | 496 | 498 | GenBank accession no. |
| | | | | | | | | AY803294 |
| Ad16 | 161 | 171 | 195 | 225 | 403 | 480 | 498 | GenBank accession no. |
| | | | | | | | | AY601636 |
| Ad21 | 161 | 171 | 195 | 225 | 403 | 480 | 498 | GenBank accession no. |
| | | | | | | | | AY601633 |
| Ad34 | 161 | 171 | 195 | 224 | 402 | 479 | 498 | GenBank accession no. |
| | | | | | | | | AY737797 |
| Ad50 | 160 | 170 | 194 | 224 | 402 | 479 | 497 | GenBank accession no. |
| | | | | | | | | AY737798 |

TABLE 22
Recombinase site positions (±1 nt) for flanking a packaging sequence

| Serotype | L1 | L2 | L3 | L4 | R1 | R2 | R3 | Reference |
|---|---|---|---|---|---|---|---|---|
| Ad35 | 160- | 170- | 194- | 223- | 401- | 478- | 496- | GenBank accession no. |
| | 162 | 172 | 196 | 225 | 403 | 480 | 498 | AY128640 |
| Ad3 | 162- | 172- | 196- | 226- | 404- | 481- | 499- | NCBI accession no. |
| | 164 | 174 | 198 | 228 | 406 | 483 | 501 | NC_011203 |
| Ad7 | 162- | 172- | 196- | 226- | 404- | 481- | 499- | GenBank accession no. |
| | 164 | 174 | 198 | 228 | 406 | 483 | 501 | AY601634 |
| Ad11 | 160- | 170- | 194- | 222- | 400- | 477- | 497- | NCBI accession no. |
| | 162 | 172 | 196 | 224 | 402 | 479 | 499 | NC_011202 |
| Ad14 | 160- | 170- | 194- | 222- | 418- | 495- | 497- | GenBank accession no. |
| | 162 | 172 | 196 | 224 | 420 | 497 | 499 | AY803294 |
| Ad16 | 160- | 170- | 194- | 224- | 402- | 479- | 497- | GenBank accession no. |
| | 162 | 172 | 196 | 226 | 404 | 481 | 499 | AY601636 |
| Ad21 | 160- | 170- | 194- | 224- | 402- | 479- | 497- | GenBank accession no. |
| | 162 | 172 | 196 | 226 | 404 | 481 | 499 | AY601633 |
| Ad34 | 160- | 170- | 194- | 223- | 401- | 478- | 497- | GenBank accession no. |
| | 162 | 172 | 196 | 225 | 403 | 480 | 499 | AY737797 |
| Ad50 | 159- | 169- | 193- | 223- | 401- | 478- | 496- | GenBank accession no. |
| | 161 | 171 | 195 | 225 | 403 | 480 | 498 | AY737798 |

TABLE 23
Recombinase site positions (±2 nt) for flanking a packaging sequence

| Serotype | L1 | L2 | L3 | L4 | R1 | R2 | R3 | Reference |
|---|---|---|---|---|---|---|---|---|
| Ad35 | 159- | 169- | 193- | 222- | 400- | 477- | 495- | GenBank accession no. |
| | 163 | 173 | 197 | 226 | 404 | 481 | 499 | AY128640 |
| Ad3 | 161- | 171- | 195- | 225- | 403- | 480- | 498- | NCBI accession no. |
| | 165 | 175 | 199 | 229 | 407 | 484 | 502 | NC_011203 |
| Ad7 | 161- | 171- | 195- | 225- | 403- | 480- | 498- | GenBank accession no. |
| | 165 | 175 | 199 | 229 | 407 | 484 | 502 | AY601634 |
| Ad11 | 159- | 169- | 193- | 221- | 399- | 476- | 496- | NCBI accession no. |
| | 163 | 173 | 197 | 225 | 403 | 480 | 500 | NC_011202 |
| Ad14 | 159- | 169- | 193- | 221- | 417- | 494- | 496- | GenBank accession no. |
| | 163 | 173 | 197 | 225 | 421 | 498 | 500 | AY803294 |
| Ad16 | 159- | 169- | 193- | 223- | 401- | 478- | 496- | GenBank accession no. |
| | 163 | 173 | 197 | 227 | 405 | 482 | 500 | AY601636 |
| Ad21 | 159- | 169- | 193- | 223- | 401- | 478- | 496- | GenBank accession no. |
| | 163 | 173 | 197 | 227 | 405 | 482 | 500 | AY601633 |
| Ad34 | 159- | 169- | 193- | 222- | 400- | 477- | 496- | GenBank accession no. |
| | 163 | 173 | 197 | 226 | 404 | 481 | 500 | AY737797 |
| Ad50 | 158- | 168- | 192- | 222- | 400- | 477- | 495- | GenBank accession no. |
| | 162 | 172 | 196 | 226 | 404 | 481 | 499 | AY737798 |

TABLE 24
Recombinase site positions (±3 nt) for flanking a packaging sequence

| Serotype | L1 | L2 | L3 | L4 | R1 | R2 | R3 | Reference |
|---|---|---|---|---|---|---|---|---|
| Ad35 | 158- | 168- | 192- | 221- | 399- | 476- | 494- | GenBank accession no. |
| | 164 | 174 | 198 | 227 | 405 | 482 | 500 | AY128640 |
| Ad3 | 160- | 170- | 194- | 224- | 402- | 479- | 497- | NCBI accession no. |
| | 166 | 176 | 200 | 230 | 408 | 485 | 503 | NC_011203 |
| Ad7 | 160- | 170- | 194- | 224- | 402- | 479- | 497- | GenBank accession no. |
| | 166 | 176 | 200 | 230 | 408 | 485 | 503 | AY601634 |
| Ad11 | 158- | 168- | 192- | 220- | 398- | 475- | 495- | NCBI accession no. |
| | 164 | 174 | 198 | 226 | 404 | 481 | 501 | NC_011202 |
| Ad14 | 158- | 168- | 192- | 220- | 416- | 493- | 495- | GenBank accession no. |
| | 164 | 174 | 198 | 226 | 422 | 499 | 501 | AY803294 |
| Ad16 | 158- | 168- | 192- | 222- | 400- | 477- | 495- | GenBank accession no. |
| | 164 | 174 | 198 | 228 | 406 | 483 | 501 | AY601636 |
| Ad21 | 158- | 168- | 192- | 222- | 400- | 477- | 495- | GenBank accession no. |
| | 164 | 174 | 198 | 228 | 406 | 483 | 501 | AY601633 |
| Ad34 | 158- | 168- | 192- | 221- | 399- | 476- | 495- | GenBank accession no. |
| | 164 | 174 | 198 | 227 | 405 | 482 | 501 | AY737797 |
| Ad50 | 157- | 167- | 191- | 221- | 399- | 476- | 494- | GenBank accession no. |
| | 163 | 173 | 197 | 227 | 405 | 482 | 500 | AY737798 |

TABLE 25
Recombinase site positions (±4 nt) for flanking a packaging sequence

| Serotype | L1 | L2 | L3 | L4 | R1 | R2 | R3 | Reference |
|---|---|---|---|---|---|---|---|---|
| Ad35 | 157- | 167- | 191- | 220- | 398- | 475- | 493- | GenBank accession no. |
| | 165 | 175 | 199 | 228 | 406 | 483 | 501 | AY128640 |
| Ad3 | 159- | 169- | 193- | 223- | 401- | 478- | 496- | NCBI accession no. |
| | 167 | 177 | 201 | 231 | 409 | 486 | 504 | NC_011203 |
| Ad7 | 159- | 169- | 193- | 223- | 401- | 478- | 496- | GenBank accession no. |
| | 167 | 177 | 201 | 231 | 409 | 486 | 504 | AY601634 |
| Ad11 | 157- | 167- | 191- | 219- | 397- | 474- | 494- | NCBI accession no. |
| | 165 | 175 | 199 | 227 | 405 | 482 | 502 | NC_011202 |
| Ad14 | 157- | 167- | 191- | 219- | 415- | 492- | 494- | GenBank accession no. |
| | 165 | 175 | 199 | 227 | 423 | 500 | 502 | AY803294 |
| Ad16 | 157- | 167- | 191- | 221- | 399- | 476- | 494- | GenBank accession no. |
| | 165 | 175 | 199 | 229 | 407 | 484 | 502 | AY601636 |
| Ad21 | 157- | 167- | 191- | 221- | 399- | 476- | 494- | GenBank accession no. |
| | 165 | 175 | 199 | 229 | 407 | 484 | 502 | AY601633 |
| Ad34 | 157- | 167- | 191- | 220- | 398- | 475- | 494- | GenBank accession no. |
| | 165 | 175 | 199 | 228 | 406 | 483 | 502 | AY737797 |
| Ad50 | 156- | 166- | 190- | 220- | 398- | 475- | 493- | GenBank accession no. |
| | 164 | 174 | 198 | 228 | 406 | 483 | 501 | AY737798 |

TABLE 26
Recombinase site positions (±5 nt) for flanking a packaging sequence

| Serotype | L1 | L2 | L3 | L4 | R1 | R2 | R3 | Reference |
|---|---|---|---|---|---|---|---|---|
| Ad35 | 156- | 166- | 190- | 219- | 397- | 474- | 492- | GenBank accession no. |
| | 166 | 176 | 200 | 229 | 407 | 484 | 502 | AY128640 |
| Ad3 | 158- | 168- | 192- | 222- | 400- | 477- | 495- | NCBI accession no. |
| | 168 | 178 | 202 | 232 | 410 | 487 | 505 | NC_011203 |
| Ad7 | 158- | 168- | 192- | 222- | 400- | 477- | 495- | GenBank accession no. |
| | 168 | 178 | 202 | 232 | 410 | 487 | 505 | AY601634 |
| Ad11 | 156- | 166- | 190- | 218- | 396- | 473- | 493- | NCBI accession no. |
| | 166 | 176 | 200 | 228 | 406 | 483 | 503 | NC_011202 |
| Ad14 | 156- | 166- | 190- | 218- | 414- | 491- | 493- | GenBank accession no. |
| | 166 | 176 | 200 | 228 | 424 | 501 | 503 | AY803294 |
| Ad16 | 156- | 166- | 190- | 220- | 398- | 475- | 493- | GenBank accession no. |
| | 166 | 176 | 200 | 230 | 408 | 485 | 503 | AY601636 |
| Ad21 | 156- | 166- | 190- | 220- | 398- | 475- | 493- | GenBank accession no. |
| | 166 | 176 | 200 | 230 | 408 | 485 | 503 | AY601633 |
| Ad34 | 156- | 166- | 190- | 219- | 397- | 474- | 493- | GenBank accession no. |
| | 166 | 176 | 200 | 229 | 407 | 484 | 503 | AY737797 |
| Ad50 | 155- | 165- | 189- | 219- | 397- | 474- | 492- | GenBank accession no. |
| | 165 | 175 | 199 | 229 | 407 | 484 | 502 | AY737798 |

TABLE 27
Recombinase site positions (±10 nt) for flanking a packaging sequence

| Serotype | L1 | L2 | L3 | L4 | R1 | R2 | R3 | Reference |
|---|---|---|---|---|---|---|---|---|
| Ad35 | 151- | 161- | 185- | 214- | 392- | 469- | 487- | GenBank accession no. |
| | 171 | 181 | 205 | 234 | 412 | 489 | 507 | AY128640 |
| Ad3 | 153- | 163- | 187- | 217- | 395- | 472- | 490- | NCBI accession no. |
| | 173 | 183 | 207 | 237 | 415 | 492 | 510 | NC_011203 |
| Ad7 | 153- | 163- | 187- | 217- | 395- | 472- | 490- | GenBank accession no. |
| | 173 | 183 | 207 | 237 | 415 | 492 | 510 | AY601634 |
| Ad11 | 151- | 161- | 185- | 213- | 391- | 468- | 488- | NCBI accession no. |
| | 171 | 181 | 205 | 233 | 411 | 488 | 508 | NC_011202 |
| Ad14 | 151- | 161- | 185- | 213- | 409- | 486- | 488- | GenBank accession no. |
| | 171 | 181 | 205 | 233 | 429 | 506 | 508 | AY803294 |
| Ad16 | 151- | 161- | 185- | 215- | 393- | 470- | 488- | GenBank accession no. |
| | 171 | 181 | 205 | 235 | 413 | 490 | 508 | AY601636 |
| Ad21 | 151- | 161- | 185- | 215- | 393- | 470- | 488- | GenBank accession no. |
| | 171 | 181 | 205 | 235 | 413 | 490 | 508 | AY601633 |
| Ad34 | 151- | 161- | 185- | 214- | 392- | 469- | 488- | GenBank accession no. |
| | 171 | 181 | 205 | 234 | 412 | 489 | 508 | AY737797 |
| Ad50 | 150- | 160- | 184- | 214- | 392- | 469- | 487- | GenBank accession no. |
| | 170 | 180 | 204 | 234 | 412 | 489 | 507 | AY737798 |

[0170] In various embodiments, a first recombinase site (e.g., a loxP site) and a second recombinase site (e.g., a loxP site) are positioned or inserted at positions separated by 178 nucleotides. In various embodiments, a first recombinase site (e.g., a loxP site) and a second recombinase site (e.g., a loxP site) are positioned or inserted at positions separated by 231 nucleotides. In various embodiments, a first recombinase site (e.g., a loxP site) and a second recombinase site (e.g., a loxP site) are positioned or inserted at positions separated by 284 nucleotides. In various embodiments, a first recombinase site (e.g., a loxP site) and a second recombinase site (e.g., a loxP site) are positioned or inserted at positions separated by 337 nucleotides.

[0171] In various embodiments, a first recombinase site (e.g., a loxP site) is positioned or inserted at a position corresponding to a position that is 178 nucleotides to the left of a R1 site of a reference genome, as set forth in any one of Tables 21-27. In various embodiments, a first recombinase site (e.g., a loxP site) is positioned or inserted at a position corresponding to a position that is 231 nucleotides to the left of a R1 site of a reference genome, as set forth in any one of Tables 21-27. In various embodiments, a first recombinase site (e.g., a loxP site) is positioned or inserted at a position corresponding to a position that is 284 nucleotides to the left of a R2 site of a reference genome, as set forth in any one of Tables 21-27. In various embodiments, a first recombinase site (e.g., a loxP site) is positioned or inserted at a position corresponding to a position that is 337 nucleotides to the left of a R3 site of a reference genome, as set forth in any one of Tables 21-27.

[0172] In various embodiments, a second recombinase site (e.g., a loxP site) is positioned or inserted at a position corresponding to a position that is 337 nucleotides to the right of a L1 site of a reference genome, as set forth in any one of Tables 21-27. In various embodiments, a second recombinase site (e.g., a loxP site) is positioned or inserted at a position corresponding to a position that is 231 nucleotides to the right of a L2 site of a reference genome, as set forth in any one of Tables 21-27. In various embodiments, a second recombinase site (e.g., a loxP site) is positioned or inserted at a position corresponding to a position that is 284 nucleotides to the right of a L3 site of a reference genome, as set forth in any one of Tables 21-27. In various embodiments, a second recombinase site (e.g., a loxP site) is positioned or inserted at a position corresponding to a position that is 178 nucleotides to the right of a L4 site of a reference genome, as set forth in any one of Tables 21-27.

[0173] In various embodiments, an Ad3, Ad7, Ad11, Ad14, Ad16, Ad21, Ad34, or Ad50 helper vector can include recombinase sites positioned or inserted to flank a packaging sequence, where a first recombinase site (e.g., a loxP site) is positioned or inserted at (e.g., immediately adjacent to, e.g., before or after) a position corresponding to a position that is within 10 nucleotides of an L1, L2, L3, or L4 site of a reference genome, as set forth in Table 21, and a second recombinase site (e.g., a loxP site) is positioned or inserted at (e.g., immediately adjacent to, e.g., before or after) a position corresponding to a position that is within 10 nucleotides of an R1, R2, or R3 site of a reference genome, as set forth in Table 21.

[0174] In certain exemplary embodiments, a first recombinase site (e.g., a loxP site) is positioned or inserted at a position corresponding to a position that is within 10 nucleotides of an L1 site of a reference genome, as set forth in Table 21, and a second recombinase site (e.g., a loxP site) is positioned or inserted at a position corresponding to a position that is within 10 nucleotides of an R3 site of a reference genome, as set forth in Table 21.

[0175] In certain exemplary embodiments, a first recombinase site (e.g., a loxP site) is positioned or inserted at a position corresponding to a position that is within 10 nucleotides of an L2 site of a reference genome, as set forth in Table 21, and a second recombinase site (e.g., a loxP site) is positioned or inserted at a position corresponding to a position that is within 10 nucleotides of an R1 site of a reference genome, as set forth in Table 21.

[0176] In certain exemplary embodiments, a first recombinase site (e.g., a loxP site) is positioned or inserted at a position corresponding to a position that is within 10 nucleotides of an L3 site of a reference genome, as set forth in Table 21, and a second recombinase site (e.g., a loxP site) is positioned or inserted at a position corresponding to a position that is within 10 nucleotides of an R2 site of a reference genome, as set forth in Table 21.

[0177] In certain exemplary embodiments, a first recombinase site (e.g., a loxP site) is positioned or inserted at a position corresponding to a position that is within 10 nucleotides of an L4 site of a reference genome, as set forth in Table 21, and a second recombinase site (e.g., a loxP site) is positioned or inserted at a position corresponding to a position that is within 10 nucleotides of an R1 site of a reference genome, as set forth in Table 21.

[0178] In various embodiments, an Ad3, Ad7, Ad11, Ad14, Ad16, Ad21, Ad34, or Ad50 helper vector can include recombinase sites positioned or inserted to flank a packaging sequence, where a first recombinase site (e.g., a loxP site) is positioned or inserted at (e.g., immediately adjacent to, e.g., before or after) a position corresponding to a position at an L1, L2, L3, or L4 site of a reference genome, as set forth in Table 21, and a second recombinase site (e.g., a loxP site) is positioned or inserted at (e.g., immediately adjacent to, e.g., before or after) a position corresponding to a position at an R1, R2, or R3 site of a reference genome, as set forth in Table 21.

[0179] In certain exemplary embodiments, a first recombinase site (e.g., a loxP site) is positioned or inserted at a position corresponding to a position at an L1 site of a reference genome, as set forth in Table 21, and a second recombinase site (e.g., a loxP site) is positioned or inserted at a position corresponding to a position at an R3 site of a reference genome, as set forth in Table 21.

[0180] In certain exemplary embodiments, a first recombinase site (e.g., a loxP site) is positioned or inserted at a position corresponding to a position at an L2 site of a reference genome, as set forth in Table 21, and a second recombinase site (e.g., a loxP site) is positioned or inserted at a position corresponding to a position at an R1 site of a reference genome, as set forth in Table 21.

[0181] In certain exemplary embodiments, a first recombinase site (e.g., a loxP site) is positioned or inserted at a position corresponding to a position at an L3 site of a reference genome, as set forth in Table 21, and a second recombinase site (e.g., a loxP site) is positioned or inserted at a position corresponding to a position at an R2 site of a reference genome, as set forth in Table 21.

[0182] In certain exemplary embodiments, a first recombinase site (e.g., a loxP site) is positioned or inserted at a position corresponding to a position at an L4 site of a reference genome, as set forth in Table 21, and a second recombinase site (e.g., a loxP site) is positioned or inserted at a position corresponding to a position at an R1 site of a reference genome, as set forth in Table 21.

[0183] In various embodiments, an Ad3, Ad7, Ad11, Ad14, Ad16, Ad21, Ad34, or Ad50 helper vector can include recombinase sites positioned or inserted to flank a packaging sequence, where a first recombinase site (e.g., a loxP site) is positioned or inserted at (e.g., immediately adjacent to, e.g., before or after) a position corresponding to a position at an L1, L2, L3, or L4 site of a reference genome, as set forth in any one of Tables 22-27, and a second recombinase site (e.g., a loxP site) is positioned or inserted at (e.g., immediately adjacent to, e.g., before or after) a position corresponding to a position at an R1, R2, or R3 site of a reference genome, as set forth in any one of Tables 22-27.

[0184] In certain exemplary embodiments, a first recombinase site (e.g., a loxP site) is positioned or inserted at a position corresponding to a position at an L1 site of a reference genome, as set forth in any one of Tables 22-27, and a second recombinase site (e.g., a loxP site) is positioned or inserted at a position corresponding to a position at an R3 site of a reference genome, as set forth in any one of Tables 22-27.

[0185] In certain exemplary embodiments, a first recombinase site (e.g., a loxP site) is positioned or inserted at a position corresponding to a position at an L2 site of a reference genome, as set forth in any one of Tables 22-27, and a second recombinase site (e.g., a loxP site) is positioned or inserted at a position corresponding to a position at an R1 site of a reference genome, as set forth in any one of Tables 22-27.

[0186] In certain exemplary embodiments, a first recombinase site (e.g., a loxP site) is positioned or inserted at a position corresponding to a position at an L3 site of a reference genome, as set forth in any one of Tables 22-27, and a second recombinase site (e.g., a loxP site) is positioned or inserted at a position corresponding to a position at an R2 site of a reference genome, as set forth in any one of Tables 22-27.

[0187] In certain exemplary embodiments, a first recombinase site (e.g., a loxP site) is positioned or inserted at a position corresponding to a position at an L4 site of a reference genome, as set forth in any one of Tables 22-27, and a second recombinase site (e.g., a loxP site) is positioned or inserted at a position corresponding to a position at an RI site of a reference genome, as set forth in any one of Tables 22-27.

[0188] In certain exemplary embodiments, a first recombinase site (e.g., a loxP site) is positioned or inserted at a position corresponding to a position that is within 10 nucleotides of an L1 site of a reference genome, as set forth in Table 21, and a second recombinase site (e.g., a loxP site) is positioned or inserted at a position corresponding to a position that is within 10 nucleotides of an R1 site of a reference genome, as set forth in Table 21.

[0189] In certain exemplary embodiments, a first recombinase site (e.g., a loxP site) is positioned or inserted at a position corresponding to a position that is within 10 nucleotides of an L1 site of a reference genome, as set forth in Table 21, and a second recombinase site (e.g., a loxP site) is positioned or inserted at a position corresponding to a position that is within 10 nucleotides of an R2 site of a reference genome, as set forth in Table 21.

[0190] In certain exemplary embodiments, a first recombinase site (e.g., a loxP site) is positioned or inserted at a position corresponding to a position that is within 10 nucleotides of an L2 site of a reference genome, as set forth in Table 21, and a second recombinase site (e.g., a loxP site) is positioned or inserted at a position corresponding to a position that is within 10 nucleotides of an R2 site of a reference genome, as set forth in Table 21.

[0191] In certain exemplary embodiments, a first recombinase site (e.g., a loxP site) is positioned or inserted at a position corresponding to a position that is within 10 nucleotides of an L2 site of a reference genome, as set forth in Table 21, and a second recombinase site (e.g., a loxP site) is positioned or inserted at a position corresponding to a position that is within 10 nucleotides of an R3 site of a reference genome, as set forth in Table 21.

[0192] In certain exemplary embodiments, a first recombinase site (e.g., a loxP site) is positioned or inserted at a position corresponding to a position that is within 10 nucleotides of an L3 site of a reference genome, as set forth in Table 21, and a second recombinase site (e.g., a loxP site) is positioned or inserted at a position corresponding to a position that is within 10 nucleotides of an R1 site of a reference genome, as set forth in Table 21.

[0193] In certain exemplary embodiments, a first recombinase site (e.g., a loxP site) is positioned or inserted at a position corresponding to a position that is within 10 nucleotides of an L3 site of a reference genome, as set forth in Table 21, and a second recombinase site (e.g., a loxP site) is positioned or inserted at a position corresponding to a position that is within 10 nucleotides of an R3 site of a reference genome, as set forth in Table 21.

[0194] In certain exemplary embodiments, a first recombinase site (e.g., a loxP site) is positioned or inserted at a position corresponding to a position that is within 10 nucleotides of an L4 site of a reference genome, as set forth in Table 21, and a second recombinase site (e.g., a loxP site) is positioned or inserted at a position corresponding to a position that is within 10 nucleotides of an R2 site of a reference genome, as set forth in Table 21.

[0195] In certain exemplary embodiments, a first recombinase site (e.g., a loxP site) is positioned or inserted at a position corresponding to a position that is within 10 nucleotides of an L4 site of a reference genome, as set forth in Table 21, and a second recombinase site (e.g., a loxP site) is positioned or inserted at a position corresponding to a position that is within 10 nucleotides of an R3 site of a reference genome, as set forth in Table 21.

[0196] In certain exemplary embodiments, a first recombinase site (e.g., a loxP site) is positioned or inserted at a position corresponding to a position at an L1 site of a reference genome, as set forth in Table 21, and a second recombinase site (e.g., a loxP site) is positioned or inserted at a position corresponding to a position at an R1 site of a reference genome, as set forth in Table 21.

[0197] In certain exemplary embodiments, a first recombinase site (e.g., a loxP site) is positioned or inserted at a position corresponding to a position at an L1 site of a reference genome, as set forth in Table 21, and a second recombinase site (e.g., a loxP site) is positioned or inserted at a position corresponding to a position at an R2 site of a reference genome, as set forth in Table 21.

[0198] In certain exemplary embodiments, a first recombinase site (e.g., a loxP site) is positioned or inserted at a position corresponding to a position at an L2 site of a reference genome, as set forth in Table 21, and a second recombinase site (e.g., a loxP site) is positioned or inserted at a position corresponding to a position at an R2 site of a reference genome, as set forth in Table 21.

[0199] In certain exemplary embodiments, a first recombinase site (e.g., a loxP site) is positioned or inserted at a position corresponding to a position at an L2 site of a reference genome, as set forth in Table 21, and a second recombinase site (e.g., a loxP site) is positioned or inserted at a position corresponding to a position at an R3 site of a reference genome, as set forth in Table 21.

[0200] In certain exemplary embodiments, a first recombinase site (e.g., a loxP site) is positioned or inserted at a position corresponding to a position at an L3 site of a reference genome, as set forth in Table 21, and a second recombinase site (e.g., a loxP site) is positioned or inserted at a position corresponding to a position at an R1 site of a reference genome, as set forth in Table 21.

[0201] In certain exemplary embodiments, a first recombinase site (e.g., a loxP site) is positioned or inserted at a position corresponding to a position at an L3 site of a reference genome, as set forth in Table 21, and a second recombinase site (e.g., a loxP site) is positioned or inserted at a position corresponding to a position at an R3 site of a reference genome, as set forth in Table 21.

[0202] In certain exemplary embodiments, a first recombinase site (e.g., a loxP site) is positioned or inserted at a position corresponding to a position at an L4 site of a reference genome, as set forth in Table 21, and a second recombinase site (e.g., a loxP site) is positioned or inserted at a position corresponding to a position at an R2 site of a reference genome, as set forth in Table 21.

[0203] In certain exemplary embodiments, a first recombinase site (e.g., a loxP site) is positioned or inserted at a position corresponding to a position at an L4 site of a reference genome, as set forth in Table 21, and a second recombinase site (e.g., a loxP site) is positioned or inserted at a position corresponding to a position at an R3 site of a reference genome, as set forth in Table 21.

[0204] In certain exemplary embodiments, a first recombinase site (e.g., a loxP site) is positioned or inserted at a position corresponding to a position at an L1 site of a reference genome, as set forth in any one of Tables 22-27, and a second recombinase site (e.g., a loxP site) is positioned or inserted at a position corresponding to a position at an R1 site of a reference genome, as set forth in any one of Tables 22-27.

[0205] In certain exemplary embodiments, a first recombinase site (e.g., a loxP site) is positioned or inserted at a position corresponding to a position at an L1 site of a reference genome, as set forth in any one of Tables 22-27, and a second recombinase site (e.g., a loxP site) is positioned or inserted at a position corresponding to a position at an R2 site of a reference genome, as set forth in any one of Tables 22-27.

[0206] In certain exemplary embodiments, a first recombinase site (e.g., a loxP site) is positioned or inserted at a position corresponding to a position at an L2 site of a reference genome, as set forth in any one of Tables 22-27, and a second recombinase site (e.g., a loxP site) is positioned or inserted at a position corresponding to a position at an R2 site of a reference genome, as set forth in any one of Tables 22-27.

[0207] In certain exemplary embodiments, a first recombinase site (e.g., a loxP site) is positioned or inserted at a position corresponding to a position at an L2 site of a reference genome, as set forth in any one of Tables 22-27, and a second recombinase site (e.g., a loxP site) is positioned or inserted at a position corresponding to a position at an R3 site of a reference genome, as set forth in any one of Tables 22-27.

[0208] In certain exemplary embodiments, a first recombinase site (e.g., a loxP site) is positioned or inserted at a position corresponding to a position at an L3 site of a reference genome, as set forth in any one of Tables 22-27, and a second recombinase site (e.g., a loxP site) is positioned or inserted at a position corresponding to a position at an R1 site of a reference genome, as set forth in any one of Tables 22-27.

[0209] In certain exemplary embodiments, a first recombinase site (e.g., a loxP site) is positioned or inserted at a position corresponding to a position at an L3 site of a reference genome, as set forth in any one of Tables 22-27, and a second recombinase site (e.g., a loxP site) is positioned or inserted at a position corresponding to a position at an R3 site of a reference genome, as set forth in any one of Tables 22-27.

[0210] In certain exemplary embodiments, a first recombinase site (e.g., a loxP site) is positioned or inserted at a position corresponding to a position at an L4 site of a reference genome, as set forth in any one of Tables 22-27, and a second recombinase site (e.g., a loxP site) is positioned or inserted at a position corresponding to a position at an R2 site of a reference genome, as set forth in any one of Tables 22-27.

[0211] In certain exemplary embodiments, a first recombinase site (e.g., a loxP site) is positioned or inserted at a position corresponding to a position at an L4 site of a reference genome, as set forth in any one of Tables 22-27, and a second recombinase site (e.g., a loxP site) is positioned or inserted at a position corresponding to a position at an R3 site of a reference genome, as set forth in any one of Tables 22-27.

[0212] In various embodiments, a sequence 5′ or 3′ of a position for insertion and/or placement of a recombinase site is substituted with an alternative sequence (e.g., an alternative sequence that include a restriction site). In some embodiments, the alternative sequence contains the same number of nucleotides compared to sequence that is replaced. In some embodiments, the alternative sequence contains a different number of nucleotides compared to the sequence that is replaced. Those of skill in the art will appreciate that regardless of such substitution, the corresponding positions (e.g., a corresponding position for insertion of a recombinase site) can still be readily understood by comparison to a reference sequence.

[0213] In various embodiments, excision of a packaging sequence from an Ad3, Ad7, Ad11, Ad14, Ad16, Ad21, Ad34, or Ad50 helper genome reduces propagation of the vector by, e.g., at least 20%, 30%, 40%, 50%, 60%, 70%, 80%, 90%, 91%, 92%, 93%, 94%, 95%, 96%, 97%, 98%, 99%, 99.5%, 99.9%, or 100% (e.g., reduces propagation of the vector by a percentage having a lower bound of 20%, 30%, 40%, 50%, 60%, 70%, and an upper bound of 60%, 70%, 80%, 90%, 91%, 92%, 93%, 94%, 95%, 96%, 97%, 98%, 99%, 99.5%, 99.9%, or 100%), optionally where percent propagation is measured as the number of viral particles produced by propagation of excised vector (vector from which the recombinase site-flanked sequence has been excised) as compared to complete vector (vector from which the recombinase site-flanked sequence has not been excised) or as compared to wild-type vector of the same serotype under comparable conditions.

[0214] As noted above, homologous recombination between a helper genome including a conditionally defective packaging sequence and a donor genome that includes a wild type or reference packaging sequence can eliminate one or more recombinase sites of a conditionally defective packaging sequence, which can result in contamination of produced donor vectors. This is at least in part because two recombinase sites flanking a packaging sequence are required for excision of the packaging sequence. Excision of one or more of the recombinase sites by recombinase site-excising homologous recombination produces a helper genome that, when contacted with a recombinase corresponding to the recombinase sites, is not rendered defective for packaging (referred to herein as a constitutively packageable helper genome). The present disclosure includes the recognition that packaging sequence inversion can reduce recombinase site-excising homologous recombination.

[0215] In some embodiments, a helper genome can include a packaging sequence inversion in that a sequence including the recombinase-site flanked packaging sequence of the helper genome is present in an orientation that differs from a wild-type or reference sequence, such as a reference adenoviral genome. As those of skill in the art will appreciate, nucleic acid sequences are ordered between 5′ and 3′ termini for a given strand, and can be present within a nucleic acid context, such as a strand of genomic DNA having a particular 5′ to 3′ sequence. The “orientation” of a nucleic acid sequence fragment present in a nucleic acid context can refer to whether the order of nucleotides in the fragment is the same as in a corresponding fragment of a wild type or reference nucleic acid context (e.g., a genomic sequence that includes a sequence corresponding to the nucleic acid sequence), or inverted in that a complementary sequence running in the opposite direction (a reverse complement of a corresponding wild-type or reference sequence) is present in the nucleic acid context instead. In various embodiments as used herein, the “orientation” of a flanked packaging sequence or other nucleic acid fragment of an adenoviral genome can refer to the order of nucleotides relative to an ITR, e.g., a 5′ ITR or 3′ ITR. Inversion of a sequence comprising a recombinase-flanked packaging sequence can reduce and/or eliminate recombinase site-excising homologous recombination and thereby prevent production of constitutively packageable helper genomes.

[0216] The present disclosure therefore includes, among other things, helper vectors and genomes that include two recombinase sites that flank a packaging sequence, where the two recombinase sites correspond to (i.e., are for, or acted upon by) the same recombinase, and where a sequence that includes the flanked packaging sequence is inverted. In various embodiments, an inverted sequence is or includes a packaging sequence, such as a recombinase site-flanked packaging sequence. In various embodiments, an inverted sequence includes a recombinase site-flanked packaging sequence and one or both of the recombinase sites that flank the packaging sequence.

[0217] In various embodiments, an inverted sequence includes additional nucleic acids that are not present in a flanked packaging sequence and/or are not present in the recombinase sites that flank the packaging sequence. In various embodiments, one or both of the 5′ and 3′ ends of an inverted sequence include at least 1, 2, 3, 4, 5, 10, 20, 30, 40, 50, 75, 100, 150, 200, 250, 300, 350, 400, 450, 500, 1,000, or more nucleotides adjacent to a recombinase site. In various embodiments, an inverted sequence includes a number of nucleotides 5′ of a 5′ recombinase site of a flanked packaging sequence that has a lower bound of 1, 2, 3, 4, 5, 10, 20, 30, 40, 50, 75, 100, 150, 200, or 250 nucleotides and an upper bound of 10, 20, 30, 40, 50, 75, 100, 150, 200, 250, 300, 350, 400, 450, 500, or more nucleotides. In various embodiments, an inverted sequence includes a number of nucleotides 3′ of a 3′ recombinase site of a flanked packaging sequence that has a lower bound of 1, 2, 3, 4, 5, 10, 20, 30, 40, 50, 75, 100, 150, 200, or 250 nucleotides and an upper bound of 10, 20, 30, 40, 50, 75, 100, 150, 200, 250, 300, 350, 400, 450, 500, 1,000, or more nucleotides.

[0218] In various embodiments, an inverted sequence includes a gene. In various embodiments, an inverted sequence includes E1 or encompasses an E1 deletion. In various embodiments, an inverted sequence includes a gene encoding protein IX. In various embodiments, an inverted sequence includes a gene encoding protein IVa2.

[0219] In various embodiments, an inverted sequence does not include an ITR (e.g., a 5′ ITR). In various embodiments, an inverted sequence does not include an exon and/or does not include a portion of an exon. In various embodiments, an inverted sequence is present in a viral genome at a position that does not correspond to its position in a reference or wild-type genome. In various embodiments, an inverted sequence does not include any portion of an E1 coding sequence, protein IX coding sequence, and/or protein IVa2 coding sequence.

[0220] In various embodiments, an inverted packaging sequence can include a recombinase-flanked packaging sequence according to any embodiment (e.g., including any recombinase site positions) provided herein. In various embodiments, one or more recombinase sites are positioned within an inverted packaging sequence. In various embodiments, one or more recombinase sites are positioned outside of an inverted packaging sequence. In various embodiments, as provided herein, nucleic acid positions of an adenoviral vector of the present disclosure can be numbered according to a reference disclosed herein. In various embodiments, an inverted packaging sequence can include one or more, or all, of AI, AII, AIII, AIV, AV, and/or AVI, optionally wherein one or more, or all, of AI, AII, AIII, AIV, AV, and/or AVI are present within a sequence flanked by recombinase sites.

[0221] In various embodiments, an inverted sequence can be denoted by a first end point and a second end point, where both endpoints correspond to positions within a reference sequence. Tables 28-35 include positions of exemplary first end points (each a Left Inversion Point) and second end points (each a Right Inversion Point) for use in generating an inverted packaging sequence in reference Ad3, Ad7, Ad11, Ad14, Ad16, Ad21, Ad34, and Ad50 genomes. In various embodiments, a Left Inversion Point is not within an ITR (e.g., a 5′ ITR). In various embodiments, ranges for a Left Inversion Point (e.g., as disclosed in Tables 29-35) that encompass an ITR (e.g., a 5′ ITR) can be understood as optionally excluding any portion of the range that overlaps with an ITR disclosed herein. In various embodiments, a Left Inversion Point is within a range according to any one of Tables 29-35 except that the range only includes positions that are greater than or equal to a corresponding Left Inversion Point according to Table 28. In various embodiments, a Right Inversion Point is within a range according to any one of Tables 29-35 except that the range only includes positions that are less than or equal to a corresponding Right Inversion Point according to Table 28.

TABLE 28
End point positions for inverted packaging sequences

| | Left | Right | |
|---|---|---|---|
| | Inversion | Inversion | |
| Serotype | Point | Point | Reference |
| Ad35 | 138 | 497 | GenBank accession no. AY128640 |
| Ad3 | 137 | 500 | NCBI accession no. NC_011203 |
| Ad7 | 137 | 500 | GenBank accession no. AY601634 |
| Ad11 | 138 | 498 | NCBI accession no. NC_011202 |
| Ad14 | 138 | 498 | GenBank accession no. AY803294 |
| Ad16 | 115 | 498 | GenBank accession no. AY601636 |
| Ad21 | 115 | 498 | GenBank accession no. AY601633 |
| Ad34 | 138 | 498 | GenBank accession no. AY737797 |
| Ad50 | 115 | 497 | GenBank accession no. AY737798 |

TABLE 29
End point positions (±1 nt) for inverted packaging sequences

| | Left | Right | |
|---|---|---|---|
| | Inversion | Inversion | |
| Serotype | Point | Point | Reference |
| Ad35 | 137-139 | 496-498 | GenBank accession no. AY128640 |
| Ad3 | 136-138 | 499-501 | NCBI accession no. NC_011203 |
| Ad7 | 136-138 | 499-501 | GenBank accession no. AY601634 |
| Ad11 | 137-139 | 497-499 | NCBI accession no. NC_011202 |
| Ad14 | 137-139 | 497-499 | GenBank accession no. AY803294 |
| Ad16 | 114-116 | 497-499 | GenBank accession no. AY601636 |
| Ad21 | 114-116 | 497-499 | GenBank accession no. AY601633 |
| Ad34 | 137-139 | 497-499 | GenBank accession no. AY737797 |
| Ad50 | 114-116 | 496-498 | GenBank accession no. AY737798 |
| Ad35 | 138-139 | 496-497 | GenBank accession no. AY128640 |
| Ad3 | 137-138 | 499-500 | NCBI accession no. NC_011203 |
| Ad7 | 137-138 | 499-500 | GenBank accession no. AY601634 |
| Ad11 | 138-139 | 497-498 | NCBI accession no. NC_011202 |
| Ad14 | 138-139 | 497-498 | GenBank accession no. AY803294 |
| Ad16 | 115-116 | 497-498 | GenBank accession no. AY601636 |
| Ad21 | 115-116 | 497-498 | GenBank accession no. AY601633 |
| Ad34 | 138-139 | 497-498 | GenBank accession no. AY737797 |
| Ad50 | 115-116 | 496-497 | GenBank accession no. AY737798 |

TABLE 30
End point positions (±2 nt) for inverted packaging sequences

| | Left | Right | |
|---|---|---|---|
| | Inversion | Inversion | |
| Serotype | Point | Point | Reference |
| Ad35 | 136-140 | 495-499 | GenBank accession no. AY128640 |
| Ad3 | 135-139 | 498-502 | NCBI accession no. NC_011203 |
| Ad7 | 135-139 | 498-502 | GenBank accession no. AY601634 |
| Ad11 | 136-140 | 496-500 | NCBI accession no. NC_011202 |
| Ad14 | 136-140 | 496-500 | GenBank accession no. AY803294 |
| Ad16 | 113-117 | 496-500 | GenBank accession no. AY601636 |
| Ad21 | 113-117 | 496-500 | GenBank accession no. AY601633 |
| Ad34 | 136-140 | 496-500 | GenBank accession no. AY737797 |
| Ad50 | 113-117 | 495-499 | GenBank accession no. AY737798 |
| Ad35 | 138-140 | 495-497 | GenBank accession no. AY128640 |
| Ad3 | 137-139 | 498-500 | NCBI accession no. NC_011203 |
| Ad7 | 137-139 | 498-500 | GenBank accession no. AY601634 |
| Ad11 | 138-140 | 496-498 | NCBI accession no. NC_011202 |
| Ad14 | 138-140 | 496-498 | GenBank accession no. AY803294 |
| Ad16 | 115-117 | 496-498 | GenBank accession no. AY601636 |
| Ad21 | 115-117 | 496-498 | GenBank accession no. AY601633 |
| Ad34 | 138-140 | 496-498 | GenBank accession no. AY737797 |
| Ad50 | 115-117 | 495-497 | GenBank accession no. AY737798 |

TABLE 31
End point positions (±3 nt) for inverted packaging sequences

| | Left | Right | |
|---|---|---|---|
| | Inversion | Inversion | |
| Serotype | Point | Point | Reference |
| Ad35 | 135-141 | 494-500 | GenBank accession no. AY128640 |
| Ad3 | 134-140 | 497-503 | NCBI accession no. NC_011203 |
| Ad7 | 134-140 | 497-503 | GenBank accession no. AY601634 |
| Ad11 | 135-141 | 495-501 | NCBI accession no. NC_011202 |
| Ad14 | 135-141 | 495-501 | GenBank accession no. AY803294 |
| Ad16 | 112-118 | 495-501 | GenBank accession no. AY601636 |
| Ad21 | 112-118 | 495-501 | GenBank accession no. AY601633 |
| Ad34 | 135-141 | 495-501 | GenBank accession no. AY737797 |
| Ad50 | 112-118 | 494-500 | GenBank accession no. AY737798 |
| Ad35 | 138-141 | 494-497 | GenBank accession no. AY128640 |
| Ad3 | 137-140 | 497-500 | NCBI accession no. NC_011203 |
| Ad7 | 137-140 | 497-500 | GenBank accession no. AY601634 |
| Ad11 | 138-141 | 495-498 | NCBI accession no. NC_011202 |
| Ad14 | 138-141 | 495-498 | GenBank accession no. AY803294 |
| Ad16 | 115-118 | 495-498 | GenBank accession no. AY601636 |
| Ad21 | 115-118 | 495-498 | GenBank accession no. AY601633 |
| Ad34 | 138-141 | 495-498 | GenBank accession no. AY737797 |
| Ad50 | 115-118 | 494-497 | GenBank accession no. AY737798 |

TABLE 32
End point positions (±4 nt) for inverted packaging sequences

| | Left | Right | |
|---|---|---|---|
| | Inversion | Inversion | |
| Serotype | Point | Point | Reference |
| Ad35 | 134-142 | 493-501 | GenBank accession no. AY128640 |
| Ad3 | 133-141 | 496-504 | NCBI accession no. NC_011203 |
| Ad7 | 133-141 | 496-504 | GenBank accession no. AY601634 |
| Ad11 | 134-142 | 494-502 | NCBI accession no. NC_011202 |
| Ad14 | 134-142 | 494-502 | GenBank accession no. AY803294 |
| Ad16 | 111-119 | 494-502 | GenBank accession no. AY601636 |
| Ad21 | 111-119 | 494-502 | GenBank accession no. AY601633 |
| Ad34 | 134-142 | 494-502 | GenBank accession no. AY737797 |
| Ad50 | 111-119 | 493-501 | GenBank accession no. AY737798 |
| Ad35 | 138-142 | 493-497 | GenBank accession no. AY128640 |
| Ad3 | 137-141 | 496-500 | NCBI accession no. NC_011203 |
| Ad7 | 137-141 | 496-500 | GenBank accession no. AY601634 |
| Ad11 | 138-142 | 494-498 | NCBI accession no. NC_011202 |
| Ad14 | 138-142 | 494-498 | GenBank accession no. AY803294 |
| Ad16 | 115-119 | 494-498 | GenBank accession no. AY601636 |
| Ad21 | 115-119 | 494-498 | GenBank accession no. AY601633 |
| Ad34 | 138-142 | 494-498 | GenBank accession no. AY737797 |
| Ad50 | 115-119 | 493-497 | GenBank accession no. AY737798 |

TABLE 33
End point positions (±5 nt) for inverted packaging sequences

| | Left | Right | |
|---|---|---|---|
| | Inversion | Inversion | |
| Serotype | Point | Point | Reference |
| Ad35 | 133-143 | 492-502 | GenBank accession no. AY128640 |
| Ad3 | 132-142 | 495-505 | NCBI accession no. NC_011203 |
| Ad7 | 132-142 | 495-505 | GenBank accession no. AY601634 |
| Ad11 | 133-143 | 493-503 | NCBI accession no. NC_011202 |
| Ad14 | 133-143 | 493-503 | GenBank accession no. AY803294 |
| Ad16 | 110-120 | 493-503 | GenBank accession no. AY601636 |
| Ad21 | 110-120 | 493-503 | GenBank accession no. AY601633 |
| Ad34 | 133-143 | 493-503 | GenBank accession no. AY737797 |
| Ad50 | 110-120 | 492-502 | GenBank accession no. AY737798 |
| Ad35 | 138-143 | 492-497 | GenBank accession no. AY128640 |
| Ad3 | 137-142 | 495-500 | NCBI accession no. NC_011203 |
| Ad7 | 137-142 | 495-500 | GenBank accession no. AY601634 |
| Ad11 | 138-143 | 493-498 | NCBI accession no. NC_011202 |
| Ad14 | 138-143 | 493-498 | GenBank accession no. AY803294 |
| Ad16 | 115-120 | 493-498 | GenBank accession no. AY601636 |
| Ad21 | 115-120 | 493-498 | GenBank accession no. AY601633 |
| Ad34 | 138-143 | 493-498 | GenBank accession no. AY737797 |
| Ad50 | 115-120 | 492-497 | GenBank accession no. AY737798 |

TABLE 34
End point positions (±10 nt) for inverted packaging sequences

| | Left | Right | |
|---|---|---|---|
| | Inversion | Inversion | |
| Serotype | Point | Point | Reference |
| Ad35 | 128-148 | 487-507 | GenBank accession no. AY128640 |
| Ad3 | 127-147 | 490-510 | NCBI accession no. NC_011203 |
| Ad7 | 127-147 | 490-510 | GenBank accession no. AY601634 |
| Ad11 | 128-148 | 488-508 | NCBI accession no. NC_011202 |
| Ad14 | 128-148 | 488-508 | GenBank accession no. AY803294 |
| Ad16 | 105-125 | 488-508 | GenBank accession no. AY601636 |
| Ad21 | 105-125 | 488-508 | GenBank accession no. AY601633 |
| Ad34 | 128-148 | 488-508 | GenBank accession no. AY737797 |
| Ad50 | 105-125 | 487-507 | GenBank accession no. AY737798 |
| Ad35 | 138-148 | 487-497 | GenBank accession no. AY128640 |
| Ad3 | 137-147 | 490-500 | NCBI accession no. NC_011203 |
| Ad7 | 137-147 | 490-500 | GenBank accession no. AY601634 |
| Ad11 | 138-148 | 488-498 | NCBI accession no. NC_011202 |
| Ad14 | 138-148 | 488-498 | GenBank accession no. AY803294 |
| Ad16 | 115-125 | 488-498 | GenBank accession no. AY601636 |
| Ad21 | 115-125 | 488-498 | GenBank accession no. AY601633 |
| Ad34 | 138-148 | 488-498 | GenBank accession no. AY737797 |
| Ad50 | 115-125 | 487-497 | GenBank accession no. AY737798 |

TABLE 35
End point positions (±25 nt) for inverted packaging sequences

| | Left | Right | |
|---|---|---|---|
| | Inversion | Inversion | |
| Serotype | Point | Point | Reference |
| Ad35 | 113-163 | 472-522 | GenBank accession no. AY128640 |
| Ad3 | 112-162 | 475-525 | NCBI accession no. NC_011203 |
| Ad7 | 112-162 | 475-525 | GenBank accession no. AY601634 |
| Ad11 | 113-163 | 473-523 | NCBI accession no. NC_011202 |
| Ad14 | 113-163 | 473-523 | GenBank accession no. AY803294 |
| Ad16 | 90-140 | 473-523 | GenBank accession no. AY601636 |
| Ad21 | 90-140 | 473-523 | GenBank accession no. AY601633 |
| Ad34 | 113-163 | 473-523 | GenBank accession no. AY737797 |
| Ad50 | 90-140 | 472-522 | GenBank accession no. AY737798 |
| Ad35 | 138-163 | 472-497 | GenBank accession no. AY128640 |
| Ad3 | 137-162 | 475-500 | NCBI accession no. NC_011203 |
| Ad7 | 137-162 | 475-500 | GenBank accession no. AY601634 |
| Ad11 | 138-163 | 473-498 | NCBI accession no. NC_011202 |
| Ad14 | 138-163 | 473-498 | GenBank accession no. AY803294 |
| Ad16 | 115-140 | 473-498 | GenBank accession no. AY601636 |
| Ad21 | 115-140 | 473-498 | GenBank accession no. AY601633 |
| Ad34 | 138-163 | 473-498 | GenBank accession no. AY737797 |
| Ad50 | 115-140 | 472-497 | GenBank accession no. AY737798 |

[0222] In some embodiments, the inverted sequence is or includes a sequence corresponding to a portion of a reference sequence that comprises a first end point at a nucleotide position corresponding to a position within 25 nucleotides of a Left Inversion Point of a reference sequence, as set forth in Table 28. In some embodiments, the inverted sequence is or includes a sequence corresponding to a portion of a reference sequence that comprises a second end point at a nucleotide position corresponding to a position within 25 nucleotides of a Right Inversion Point of a reference sequence, as set forth in Table 28.

[0223] In some embodiments, the inverted sequence is or includes a sequence corresponding to a portion of a reference sequence that comprises a first end point at a nucleotide position corresponding to a position within 10 nucleotides of a Left Inversion Point of a reference sequence, as set forth in Table 28. In some embodiments, the inverted sequence is or includes a sequence corresponding to a portion of a reference sequence that comprises a second end point at a nucleotide position corresponding to a position within 10 nucleotides of a Right Inversion Point of a reference sequence, as set forth in Table 28.

[0224] In some embodiments, the inverted sequence is or includes a sequence corresponding to a portion of a reference sequence that comprises a first end point at a nucleotide position corresponding to a position at a Left Inversion Point of a reference sequence, as set forth in Table 28. In some embodiments, the inverted sequence is or includes a sequence corresponding to a portion of a reference sequence that comprises a second end point at a nucleotide position corresponding to a position at a Right Inversion Point of a reference sequence, as set forth in Table 28.

[0225] In some embodiments, the inverted sequence is or includes a sequence corresponding to a portion of a reference sequence that comprises a first end point at a nucleotide position corresponding to a position at a Left Inversion Point of a reference sequence, as set forth in any one of Table 29-35. In some embodiments, the inverted sequence is or includes a sequence corresponding to a portion of a reference sequence that comprises a second end point at a nucleotide position corresponding to a position at a Right Inversion Point of a reference sequence, as set forth in any one of Table 29-35.

[0226] In certain exemplary embodiments,
[0227] (i) a first recombinase site (e.g., a loxP site) at a nucleotide position corresponding to a position within 10 nucleotides of an L1, L2, L3, or L4 site of a reference sequence, as set forth in Table 21;
[0228] (ii) a second recombinase site (e.g., a loxP site) at a nucleotide position corresponding to a position within 10 nucleotides of an R1, R2, or R3 site of a reference sequence, as set forth in Table 21; and
[0229] (iii) an inversion of a sequence that includes:
   [0230] (a) a first end point at a position corresponding to a position within 25 nucleotides of a Left Inversion Point (e.g., within 10 nucleotides of a Left Inversion Point, e.g., at a Left Inversion Point) of a reference sequence, as set forth in Table 28, and
   [0231] (b) a second end point at a position corresponding to a position within 25 nucleotides of a Right Inversion Point (e.g., within 10 nucleotides of a Right Inversion Point, e.g., at a Right Inversion Point) of a reference sequence, as set forth in Table 28.

[0232] In certain exemplary embodiments,
[0233] (i) a first recombinase site (e.g., a loxP site) at a nucleotide position corresponding to a position within 10 nucleotides of an L1 site of a reference sequence, as set forth in Table 21;
[0234] (ii) a second recombinase site (e.g., a loxP site) at a nucleotide position corresponding to a position within 10 nucleotides of an R3 site of a reference sequence, as set forth in Table 21; and
[0235] (iii) an inversion of a sequence that includes:
   [0236] (a) a first end point at a position corresponding to a position within 25 nucleotides of a Left Inversion Point (e.g., within 10 nucleotides of a Left Inversion Point, e.g., at a Left Inversion Point) of a reference sequence, as set forth in Table 28, and
   [0237] (b) a second end point at a position corresponding to a position within 25 nucleotides of a Right Inversion Point (e.g., within 10 nucleotides of a Right Inversion Point, e.g., at a Right Inversion Point) of a reference sequence, as set forth in Table 28.

[0238] In certain exemplary embodiments,
[0239] (i) a first recombinase site (e.g., a loxP site) at a nucleotide position corresponding to a position within 10 nucleotides of an L2 site of a reference sequence, as set forth in Table 21;
[0240] (ii) a second recombinase site (e.g., a loxP site) at a nucleotide corresponding to a position within 10 nucleotides of an RI site of a reference sequence, as set forth in Table 21; and
[0241] (iii) an inversion of a sequence that includes:
   [0242] (a) a first end point at a position corresponding to a position within 25 nucleotides of a Left Inversion Point (e.g., within 10 nucleotides of a Left Inversion Point, e.g., at a Left Inversion Point) of a reference sequence, as set forth in Table 28, and
   [0243] (b) a second end point at a position corresponding to a position within 25 nucleotides of a Right Inversion Point (e.g., within 10 nucleotides of a Right Inversion Point, e.g., at a Right Inversion Point) of a reference sequence, as set forth in Table 28.

[0244] In certain exemplary embodiments,
[0245] (i) a first recombinase site (e.g., a loxP site) at a nucleotide position corresponding to a position within 10 nucleotides of an L3 site of a reference sequence, as set forth in Table 21;
[0246] (ii) a second recombinase site (e.g., a loxP site) at a nucleotide corresponding to a position within 10 nucleotides of an R2 site of a reference sequence, as set forth in Table 21; and
[0247] (iii) an inversion of a sequence that includes:
   [0248] (a) a first end point at a position corresponding to a position within 25 nucleotides of a Left Inversion Point (e.g., within 10 nucleotides of a Left Inversion Point, e.g., at a Left Inversion Point) of a reference sequence, as set forth in Table 28, and
   [0249] (b) a second end point at a position corresponding to a position within 25 nucleotides of a Right Inversion Point (e.g., within 10 nucleotides of a Right Inversion Point, e.g., at a Right Inversion Point) of a reference sequence, as set forth in Table 28.

[0250] In certain exemplary embodiments,
[0251] (i) a first recombinase site (e.g., a loxP site) at a nucleotide position corresponding to a position within 10 nucleotides of an L4 site of a reference sequence, as set forth in Table 21;
[0252] (ii) a second recombinase site (e.g., a loxP site) at a nucleotide position corresponding to a position within 10 nucleotides of an R1 site of a reference sequence, as set forth in Table 21; and
[0253] (iii) an inversion of a sequence that includes:
   [0254] (a) a first end point at a position corresponding to a position within 25 nucleotides of a Left Inversion Point (e.g., within 10 nucleotides of a Left Inversion Point, e.g., at a Left Inversion Point) of a reference sequence, as set forth in Table 28, and
   [0255] (b) a second end point at a position corresponding to a position within 25 nucleotides of a Right Inversion Point (e.g., within 10 nucleotides of a Right Inversion Point, e.g., at a Right Inversion Point) of a reference sequence, as set forth in Table 28.

[0256] In certain exemplary embodiments,
[0257] (i) a first recombinase site (e.g., a loxP site) at a nucleotide position corresponding to a position at an L1, L2, L3, or L4 site of a reference sequence, as set forth in Table 21;
[0258] (ii) a second recombinase site (e.g., a loxP site) at a nucleotide position corresponding to a position at an R1, R2, or R3 site of a reference sequence, as set forth in Table 21; and
[0259] (iii) an inversion of a sequence that includes:
   [0260] (a) a first end point at a position corresponding to a position within 25 nucleotides of a Left Inversion Point (e.g., within 10 nucleotides of a Left Inversion Point, e.g., at a Left Inversion Point) of a reference sequence, as set forth in Table 28, and
   [0261] (b) a second end point at a position corresponding to a position within 25 nucleotides of a Right Inversion Point (e.g., within 10 nucleotides of a Right Inversion Point, e.g., at a Right Inversion Point) of a reference sequence, as set forth in Table 28.

[0262] In certain exemplary embodiments,
[0263] (i) a first recombinase site (e.g., a loxP site) at a nucleotide position corresponding to a position at an L1 site of a reference sequence, as set forth in Table 21;
[0264] (ii) a second recombinase site (e.g., a loxP site) at a nucleotide position corresponding to a position at an R3 site of a reference sequence, as set forth in Table 21; and
[0265] (iii) an inversion of a sequence that includes:
   [0266] (a) a first end point at a position corresponding to a position within 25 nucleotides of a Left Inversion Point (e.g., within 10 nucleotides of a Left Inversion Point, e.g., at a Left Inversion Point) of a reference sequence, as set forth in Table 28, and
   [0267] (b) a second end point at a position corresponding to a position within 25 nucleotides of a Right Inversion Point (e.g., within 10 nucleotides of a Right Inversion Point, e.g., at a Right Inversion Point) of a reference sequence, as set forth in Table 28.

[0268] In certain exemplary embodiments,
[0269] (i) a first recombinase site (e.g., a loxP site) at a nucleotide position corresponding to a position at an L2 site of a reference sequence, as set forth in Table 21;
[0270] (ii) a second recombinase site (e.g., a loxP site) at a nucleotide position corresponding to a position at an R1 site of a reference sequence, as set forth in Table 21; and
[0271] (iii) an inversion of a sequence that includes:
   [0272] (a) a first end point at a position corresponding to a position within 25 nucleotides of a Left Inversion Point (e.g., within 10 nucleotides of a Left Inversion Point, e.g., at a Left Inversion Point) of a reference sequence, as set forth in Table 28, and
   [0273] (b) a second end point at a position corresponding to a position within 25 nucleotides of a Right Inversion Point (e.g., within 10 nucleotides of a Right Inversion Point, e.g., at a Right Inversion Point) of a reference sequence, as set forth in Table 28.

[0274] In certain exemplary embodiments,
[0275] (i) a first recombinase site (e.g., a loxP site) at a nucleotide position corresponding to a position at an L3 site of a reference sequence, as set forth in Table 21;
[0276] (ii) a second recombinase site (e.g., a loxP site) at a nucleotide position corresponding to a position at an R2 site of a reference sequence, as set forth in Table 21; and
[0277] (iii) an inversion of a sequence that includes:
   [0278] (a) a first end point at a position corresponding to a position within 25 nucleotides of a Left Inversion Point (e.g., within 10 nucleotides of a Left Inversion Point, e.g., at a Left Inversion Point) of a reference sequence, as set forth in Table 28, and
   [0279] (b) a second end point at a position corresponding to a position within 25 nucleotides of a Right Inversion Point (e.g., within 10 nucleotides of a Right Inversion Point, e.g., at a Right Inversion Point) of a reference sequence, as set forth in Table 28.

[0280] In certain exemplary embodiments,
[0281] (i) a first recombinase site (e.g., a loxP site) at a nucleotide position corresponding to a position at an L4 site of a reference sequence, as set forth in Table 21;
[0282] (ii) a second recombinase site (e.g., a loxP site) at a nucleotide position corresponding to a position at an R1 site of a reference sequence, as set forth in Table 21; and
[0283] (iii) an inversion of a sequence that includes:
   [0284] (a) a first end point at a position corresponding to a position within 25 nucleotides of a Left Inversion Point (e.g., within 10 nucleotides of a Left Inversion Point, e.g., at a Left Inversion Point) of a reference sequence, as set forth in Table 28, and
   [0285] (b) a second end point at a position corresponding to a position within 25 nucleotides of a Right Inversion Point (e.g., within 10 nucleotides of a Right Inversion Point, e.g., at a Right Inversion Point) of a reference sequence, as set forth in Table 28.

[0286] In certain exemplary embodiments,
[0287] (i) a first recombinase site (e.g., a loxP site) at a nucleotide position corresponding to a position at an L1, L2, L3, or L4 site of a reference sequence, as set forth in any one of Tables 22-27;
[0288] (ii) a second recombinase site (e.g., a loxP site) at a nucleotide position corresponding to a position at an R1, R2, or R3 site of a reference sequence, as set forth in any one of Tables 22-27; and
[0289] (iii) an inversion of a sequence that includes:
   [0290] (a) a first end point at a position corresponding to a position within 25 nucleotides of a Left Inversion Point (e.g., within 10 nucleotides of a Left Inversion Point, e.g., at a Left Inversion Point) of a reference sequence, as set forth in any one of Table 26, and
   [0291] (b) a second end point at a position corresponding to a position within 25 nucleotides of a Right Inversion Point (e.g., within 10 nucleotides of a Right Inversion Point, e.g., at a Right Inversion Point) of a reference sequence, as set forth in Table 28.

[0292] In certain exemplary embodiments,
[0293] (i) a first recombinase site (e.g., a loxP site) at a nucleotide position corresponding to a position at an L1 site of a reference sequence, as set forth in any one of Tables 22-27;
[0294] (ii) a second recombinase site (e.g., a loxP site) at a nucleotide position corresponding to a position at an R3 site of a reference sequence, as set forth in any one of Tables 22-27; and
[0295] (iii) an inversion of a sequence that includes:
   [0296] (a) a first end point at a position corresponding to a position within 25 nucleotides of a Left Inversion Point (e.g., within 10 nucleotides of a Left Inversion Point, e.g., at a Left Inversion Point) of a reference sequence, as set forth in Table 28, and
   [0297] (b) a second end point at a position corresponding to a position within 25 nucleotides of a Right Inversion Point (e.g., within 10 nucleotides of a Right Inversion Point, e.g., at a Right Inversion Point) of a reference sequence, as set forth in Table 28.

[0298] In certain exemplary embodiments,
[0299] (i) a first recombinase site (e.g., a loxP site) at a nucleotide position corresponding to a position at an L2 site of a reference sequence, as set forth in any one of Tables 22-27;
[0300] (ii) a second recombinase site (e.g., a loxP site) at a nucleotide position corresponding to a position at an R1 site of a reference sequence, as set forth in any one of Tables 22-27; and
[0301] (iii) an inversion of a sequence that includes:
   [0302] (a) a first end point at a position corresponding to a position within 25 nucleotides of a Left Inversion Point (e.g., within 10 nucleotides of a Left Inversion Point, e.g., at a Left Inversion Point) of a reference sequence, as set forth in Table 28, and
   [0303] (b) a second end point at a position corresponding to a position within 25 nucleotides of a Right Inversion Point (e.g., within 10 nucleotides of a Right Inversion Point, e.g., at a Right Inversion Point) of a reference sequence, as set forth in Table 28.

[0304] In certain exemplary embodiments,
[0305] (i) a first recombinase site (e.g., a loxP site) at a nucleotide position corresponding to a position at an L3 site of a reference sequence, as set forth in any one of Tables 22-27;
[0306] (ii) a second recombinase site (e.g., a loxP site) at a nucleotide position corresponding to a position at an R2 site of a reference sequence, as set forth in any one of Tables 22-27; and
[0307] (iii) an inversion of a sequence that includes:
   [0308] (a) a first end point at a position corresponding to a position within 25 nucleotides of a Left Inversion Point (e.g., within 10 nucleotides of a Left Inversion Point, e.g., at a Left Inversion Point) of a reference sequence, as set forth in Table 28, and
   [0309] (b) a second end point at a position corresponding to a position within 25 nucleotides of a Right Inversion Point (e.g., within 10 nucleotides of a Right Inversion Point, e.g., at a Right Inversion Point) of a reference sequence, as set forth in Table 28.

[0310] In certain exemplary embodiments,
[0311] (i) a first recombinase site (e.g., a loxP site) at a nucleotide position corresponding to a position at an L4 site of a reference sequence, as set forth in any one of Tables 22-27;
[0312] (ii) a second recombinase site (e.g., a loxP site) at a nucleotide position corresponding to a position at an RI site of a reference sequence, as set forth in any one of Tables 22-27; and
[0313] (iii) an inversion of a sequence that includes:
   [0314] (a) a first end point at a position corresponding to a position within 25 nucleotides of a Left Inversion Point (e.g., within 10 nucleotides of a Left Inversion Point, e.g., at a Left Inversion Point) of a reference sequence, as set forth in Table 28, and
   [0315] (b) a second end point at a position corresponding to a position within 25 nucleotides of a Right Inversion Point (e.g., within 10 nucleotides of a Right Inversion Point, e.g., at a Right Inversion Point) of a reference sequence, as set forth in Table 28.

[0316] Those of skill in the art will appreciate that there are a variety of means by which an inversion can be produced within a larger sequence such as an adenoviral genome. Such inversions can be produced using various available tools of molecular biology. For example, in certain embodiments, an inverted sequence can by synthesized or isolated and inserted into a target sequence by various means known in the art. In certain embodiments, a sequence for inversion can be positioned between two copies of a palindromic restriction site, such that contacting a sequence including the sequence for inversion flanked by the restriction sites can result in an inversion in accordance with various methods known in the art.

[0317] To provide one non-limiting example of a technique for producing an inversion of a sequence within an adenoviral genome, FseI sites can be inserted at positions that flank a packaging sequence or sequence including a packaging sequence, optionally wherein the packaging sequence is flanked by recombinase sites that are in turn between the FseI sites. Such a sequence can be digested with FseI to excise the FseI site-flanked sequence, which excised sequence can then be re-ligated into the digested sequence in the opposite orientation.

[0318] The present disclosure includes, among other things, Ad3, Ad7, Ad11, Ad14, Ad16, Ad21, Ad34, and Ad50 helper genomes as disclosed herein and Ad3, Ad7, Ad11, Ad14, Ad16, Ad21, Ad34, and Ad50 helper vectors that include the same. The present disclosure further includes use of Ad3, Ad7, Ad11, Ad14, Ad16, Ad21, Ad34, and Ad50 helper genomes and vectors in a method or composition for production of helper-dependent adenoviral (HDAd) donor vectors of serotype Ad3, Ad7, Ad11, Ad14, Ad16, Ad21, Ad34, or Ad50. The present disclosure further includes cells that include Ad3, Ad7, Ad11, Ad14, Ad16, Ad21, Ad34, or Ad50 helper vectors and/or Ad35 helper genomes (and optionally further include an HDAd donor genome of serotype Ad3, Ad7, Ad11, Ad14, Ad16, Ad21, Ad34, or Ad50), e.g., for production of HDAd35 donor vectors. The present disclosure further includes use of such cells in a method or composition for production of HDAd donor vectors of serotype Ad3, Ad7, Ad11, Ad14, Ad16, Ad21, Ad34, or Ad50. In certain such cells, viral proteins encoded and expressed by the helper genome can be utilized in production of HDAd donor vectors of serotype Ad3, Ad7, Ad11, Ad14, Ad16, Ad21, Ad34, or Ad50 in which the HDAd donor genome of serotype Ad3, Ad7, Ad11, Ad14, Ad16, Ad21, Ad34, or Ad50 is packaged. Accordingly, the present disclosure includes methods of production of HDAd donor vectors of serotype Ad3, Ad7, Ad11, Ad14, Ad16, Ad21, Ad34, or Ad50 by culturing cells that include an HDAd donor genome of serotype Ad3, Ad7, Ad11, Ad14, Ad16, Ad21, Ad34, or Ad50 and an Ad3, Ad7, Ad11, Ad14, Ad16, Ad21, Ad34, or Ad50 helper genome. In some embodiments, the cells encode and express a recombinase that corresponds to recombinase direct repeats that flank a packaging sequence of the Ad3, Ad7, Ad11, Ad14, Ad16, Ad21, Ad34, or Ad50 helper vector. In some embodiments, the flanked packaging sequence of the Ad3, Ad7, Ad11, Ad14, Ad16, Ad21, Ad34, or Ad50 helper genome has been excised.

[0319] In various embodiments, an Ad3, Ad7, Ad11, Ad14, Ad16, Ad21, Ad34, or Ad50 helper genome includes a conditional (e.g., frt-site or loxP-site flanked) packaging sequence and encodes all of the necessary proteins for production of Ad3, Ad7, Ad11, Ad14, Ad16, Ad21, Ad34, or Ad50 virions into which a donor genome can be packaged. In some embodiments, the Ad3, Ad7, Ad11, Ad14, Ad16, Ad21, Ad34, or Ad50 helper genome encodes all Ad3, Ad7, Ad11, Ad14, Ad16, Ad21, Ad34, or Ad50 coding sequences, respectively.

[0320] An additional optional engineering consideration can be engineering of a helper genome having a size that permits separation of helper vector from HDAd donor vector by centrifugation, e.g., by CsCl ultracentrifugation. One means of achieving this result is to increase the size of the helper genome as compared to a typical adenoviral genome of the same serotype. In particular, adenoviral genomes can be increased by engineering to at least 104% of wild-type length. Certain helper vectors of the present disclosure can accommodate a payload and/or stuffer sequence.

[0321] The present disclosure includes that in various embodiments a vector or genome of the present disclosure such as a helper genome can include a selection of components each selected from, or having at least 75% sequence identity (e.g., at least 75%, 80%, 85%, 90%, 95%, 96%, 97%, 98%, 99%, or 100% identity) to, a corresponding sequence of a reference genome.

[0322] The present disclosure includes systems, kits, and methods for production of helper-dependent adenoviral vectors. Broadly, systems and kits for production of helper-dependent adenoviral vectors can include one or more of a helper adenoviral genome (optionally present in a nucleic acid molecule such as a plasmid or other nucleic acid vector), a helper adenoviral vector, a helper-dependent adenoviral genome (optionally present in a nucleic acid molecule such as a plasmid or other nucleic acid vector), a helper-dependent adenoviral vector, and a production cell.

[0323] In certain embodiments, a system, kit, or method for production of helper-dependent adenoviral vectors can include a helper adenoviral genome and a helper-dependent adenoviral genome. In certain embodiments, a system, kit, or method for production of helper-dependent adenoviral vectors can include a helper adenoviral vector and a helper-dependent adenoviral vector. In certain embodiments, a system, kit, or method for production of helper-dependent adenoviral vectors can include a helper adenoviral vector and a helper-dependent adenoviral genome. In certain embodiments, a system, kit, or method for production of helper-dependent adenoviral vectors can include a helper adenoviral genome and a helper-dependent adenoviral vector.

[0324] In certain embodiments, a system, kit, or method for production of helper-dependent adenoviral vectors can include a helper adenoviral genome, a helper-dependent adenoviral genome, and a producer cell. In certain embodiments, a system, kit, or method for production of helper-dependent adenoviral vectors can include a helper adenoviral vector, a helper-dependent adenoviral vector, and a producer cell. In certain embodiments, a system, kit, or method for production of helper-dependent adenoviral vectors can include a helper adenoviral vector, a helper-dependent adenoviral genome, and a producer cell. In certain embodiments, a system, kit, or method for production of helper-dependent adenoviral vectors can include a helper adenoviral genome, a helper-dependent adenoviral vector, and a producer cell.

[0325] In certain embodiments, a system, kit, or method for production of helper-dependent adenoviral vectors can include a producer cell that includes a helper adenoviral genome and a helper-dependent adenoviral genome. In certain embodiments, a system, kit, or method for production of helper-dependent adenoviral vectors can include a producer cell that includes a helper adenoviral vector and a helper-dependent adenoviral vector. In certain embodiments, a system, kit, or method for production of helper-dependent adenoviral vectors can include a producer cell that includes a helper adenoviral vector and a helper-dependent adenoviral genome. In certain embodiments, a system, kit, or method for production of helper-dependent adenoviral vectors can include a producer cell that includes a helper adenoviral genome and a helper-dependent adenoviral vector.

[0326] Those of skill in the art will appreciate from the present disclosure that systems, kits, and methods of the present disclosure can include a helper adenoviral genome or vector and a helper-dependent genome or vector, where the helper genome encodes proteins for production of adenoviral vectors into which the helper-dependent genome can be packaged. For example, in various embodiments, a system, kit, or method of the present disclosure can include a helper adenoviral genome or vector of a particular serotype and a helper-dependent genome that is of the same serotype. In certain particular examples, a system, kit, or method of the present disclosure can include a helper adenoviral genome or vector that encodes ITRs of a particular serotype and a helper-dependent genome that has ITRs of the same serotype. In certain particular examples, a system, kit, or method of the present disclosure can include a helper adenoviral genome or vector that encodes ITRs and a packaging sequence (e.g., a conditional packaging sequence) of a particular serotype and a helper-dependent genome that has ITRs and a packaging sequence of the same serotype. In certain particular examples, a system, kit, or method of the present disclosure can include a helper adenoviral genome or vector that encodes one or more capsid proteins or protein fragments (e.g., one or more of a hexon, penton, fiber, fiber tail, fiber shaft, or fiber knob) of a particular serotype and a helper-dependent genome that has ITRs of the same serotype.

[0327] Those of skill in the art will appreciate from the present disclosure that systems, kits, and methods of the present disclosure can include a helper genome or vector that includes one or more of an E1 region deletion, an E3 region deletion, and/or an E4 region deletion. Those of skill in the art will further appreciate from the present disclosure that in various embodiments a producer cell genome encodes and/or expresses one or more adenoviral expression products, or includes adenoviral sequences, that can correspond to the serotype of the helper genome or vector and/or complement the helper genome or vector (e.g., in that proteins encoded and/or expressed by the producer cell genome permit or facilitate production of adenoviral vectors and/or packaging of helper-dependent adenoviral genomes, which are optionally present).

[0328] In various embodiments a producer cell genome encodes and/or expresses one or more E1 expression products (e.g., includes an E1 region) that can correspond to the serotype of the helper genome or vector and/or complement the helper genome or vector (e.g., in that proteins encoded and/or expressed by the producer cell genome permit or facilitate production of adenoviral vectors and/or packaging of helper-dependent adenoviral genomes, which are optionally present). In various embodiments a producer cell genome encodes and/or expresses one or more E1 expression products including at least E1b55k (e.g., includes an E1 region encoding at least E1b55k), that can correspond to the serotype of the helper genome or vector and/or complement the helper genome or vector (e.g., in that proteins encoded and/or expressed by the producer cell genome permit or facilitate production of adenoviral vectors and/or packaging of helper-dependent adenoviral genomes, which are optionally present). An E1b55k expression product, or E1 region sequence encoding an E1b55k expression product, can be said to complement an E4orf6 expression product, or E1 region sequence encoding an E4orf6 expression product, if the E1b55k and E4orf6 are able to interact in a manner that promotes, causes, enables, permits, or facilitates production of adenoviral vectors and/or packaging of helper-dependent adenoviral genomes, which helper-dependent adenoviral genomes are optionally present.

[0329] Those of skill in the art will further appreciate from the present disclosure that in various embodiments a producer cell genome encodes and/or expresses one or more E1 expression products (e.g., includes an E1 region) that can correspond to the serotype of the helper genome or vector and/or complement the helper genome or vector in that it is of the same serotype as an E4 region of the helper genome or vector, or is of the same serotype as an E4 expression product encoded and/or expressed by the helper genome or vector. In various embodiments, a producer cell genome encodes and/or expresses one or more E1 expression products (e.g., includes an E1 region) that do not correspond to the serotype of the helper genome or vector, but which correspond to the serotype of a heterologous E4 region of the helper genome or vector, or is of the same serotype as a heterologous E4 expression product encoded and/or expressed by the helper genome or vector. E1 and E4 regions and/or expression products can be referred to as complementary where the producer cell genome E1 region and/or expression products and the helper genome E4 region and/or expression products together are necessary or sufficient to promote, cause, enable, permit, or facilitate production of adenoviral vectors and/or packaging of helper-dependent adenoviral genomes, which helper-dependent adenoviral genomes are optionally present.

[0330] Those of skill in the art will further appreciate from the present disclosure that in various embodiments a producer cell genome encodes and/or expresses one or more E1 expression products including at least E1b55k (e.g., includes an E1 region encoding at least E1b55k) that can correspond to the serotype of the helper genome or vector and/or complement the helper genome or vector in that it is of the same serotype as an E4 region of the helper genome or vector encoding at least E4orf6, or is of the same serotype as an E4orf6 expression product encoded and/or expressed by the helper genome or vector. In various embodiments a producer cell genome encodes and/or expresses one or more E1 expression products including at least E1b55k (e.g., includes an E1 region encoding at least E1b55k) that do not correspond to the serotype of the helper genome or vector, but which correspond to the serotype of a heterologous E4 region of the helper genome or vector encoding at least E4orf6, or is of the same serotype as a heterologous E4orf6 expression product encoded and/or expressed by the helper genome or vector. E1 and E4 regions and/or expression products can be referred to as complementary where the producer cell genome E1 region encoding at least E1b55k and/or expression products including at least E1b55k and the helper genome E4 region encoding at least E4orf6 together are necessary or sufficient to promote, cause, enable, permit, or facilitate production of adenoviral vectors and/or packaging of helper-dependent adenoviral genomes, which helper-dependent adenoviral genomes are optionally present. In various embodiments, complementary E1 and E4 regions are both present in a producer cell genome, e.g., where a helper vector includes deletions of both E1 and E4 regions. Those of skill in the art will further appreciate that it is necessary for a producer cell genome to encode and/or express an E1 region (e.g., an E1 region encoding E1B55K) where a helper genome encodes and/or expresses E4orf3 (e.g., where the helper genome comprises an E4 deletion that does not delete E4orf3). In an illustrative example, E4 functions can be complemented in producer cells by expression of a complete E4 region, e.g., using an inducible MMTV LTR (mouse mammary tumor virus long terminal repeat) promoter (reference HAdV-5 sequence GenBank accession no. M73260).

[0331] Those of skill in the art will further appreciate from the present disclosure that in various embodiments a producer cell genome encodes and/or expresses one or more E2 expression products, e.g., including at least E2 DBP (e.g., includes an E2 region encoding at least E2 DBP) that can correspond to the serotype of the helper genome or vector and/or complement the helper genome or vector. In various embodiments a producer cell genome encodes and/or expresses one or more E2 expression products including at least E2 DBP (e.g., includes an E2 region encoding at least E2 DBP) that correspond to the serotype of the helper genome or vector. An E2 DBP sequence a helper genome can be referred to as complementary where a producer cell genome E2 region encoding at least E2 DBP is sufficient to promote, cause, enable, permit, or facilitate production of adenoviral vectors and/or packaging of helper-dependent adenoviral genomes, which helper-dependent adenoviral genomes are optionally present. Accordingly in various embodiments a producer cell genome can encode and/or express an E1 region, and E2a region, an E3 region, and/or an E4 region, optionally where one or more or all of an E1 region, an E2 region, an E3 region, and an E4 region are deleted from an adenoviral helper genome.

[0332] The present disclosure further includes a Ad3, Ad7, Ad11, Ad14, Ad16, Ad21, Ad34, or Ad50 helper-dependent vector production system including a cell including a Ad3, Ad7, Ad11, Ad14, Ad16, Ad21, Ad34, or Ad50 helper-dependent genome and an Ad3, Ad7, Ad11, Ad14, Ad16, Ad21, Ad34, or Ad50 helper genome. In certain such cells, viral proteins encoded and expressed by the helper genome can be utilized in production of Ad3, Ad7, Ad11, Ad14, Ad16, Ad21, Ad34, or Ad50 helper-dependent vectors in which the Ad3, Ad7, Ad11, Ad14, Ad16, Ad21, Ad34, or Ad50 helper-dependent genome is packaged. Accordingly, the present disclosure includes methods of production of Ad3, Ad7, Ad11, Ad14, Ad16, Ad21, Ad34, or Ad50 helper-dependent vectors by culturing cells that include an Ad3, Ad7, Ad11, Ad14, Ad16, Ad21, Ad34, or Ad50 helper-dependent genome and an Ad3, Ad7, Ad11, Ad14, Ad16, Ad21, Ad34, or Ad50 helper genome. In some embodiments the cells encode and express a recombinase that corresponds to recombinase direct repeats that flank a packaging sequence of the Ad3, Ad7, Ad11, Ad14, Ad16, Ad21, Ad34, or Ad50 helper vector. In some embodiments, the flanked packaging sequence of the Ad3, Ad7, Ad11, Ad14, Ad16, Ad21, Ad34, or Ad50 helper genome has been excised.

[0333] Various producer cells are known in the art. In various embodiments, a producer cell can be a cell that encodes and/or expresses a recombinase that corresponds to recombination sites present in a conditional packaging sequence of a helper genome. In various embodiments, a producer cell can be a cell that include and/or expresses a heterologous E1 region. In various embodiments, a producer cell can include and/or express an E1 region of an adenoviral serotype such as an Ad5 serotype. In various embodiments, a producer cell is a HEK293 cell (also referred to herein as a 293 cell) that expresses Cre recombinase and includes and/or expresses an Ad5 E1 region. In various embodiments, a producer cell is a 116 cell. In various embodiments, a producer cell is a 911 human embryonic retinoblast cell, a pTG6559 A549 cell, a PER.C6 human embryonic retinoblast cell, a GH329 HeLa cell, an N52.E6 primary human aminocyte cell, a HeLa-E1 cell, an UR HEL 299 cell, or a VLI-293 HEK293 cell. Examples of producer cells known in the art are described, e.g., in Kovesdi 2010 Viruses 2(8):1681-1703.

[0334] In various embodiments, the level of recombinase expressed by or present in a producer cell can be engineered, e.g., to achieve an increased and/or target level of recombinase and/or recombinase expression. Examples of such engineering are known in the art, see e.g., Palmer and Ng, Mol Ther. 2003; 8(5):846-852; Ng et al., J Virol. 2002; 76(9):4181-4189; and Gonzalez-Aparicio et al., Gene Ther. 2011; 18(11):1025-1033. In some embodiments, the level of recombinase expressed by or present in a producer cell can be engineered by the expression of a recombinase that is encoded by a helper genome.

[0335] Production of helper-dependent adenoviral vectors can include production of vectors in or from a producer cell or population of producer cells that include a helper genome and a helper-dependent genome. In certain embodiments, production of helper-dependent adenoviral vectors can include transfection of a plasmid including the helper-dependent adenoviral genome and a transduction of a helper vector including a helper genome to the same cell, cells, or population of cells. The helper genome can rescue propagation of the helper-dependent adenoviral vector and helper-dependent adenoviral vector can be produced, e.g., at a large scale, and purified. Various protocols are known in the art, e.g., at Palmer et al., 2009 Gene Therapy Protocols. Methods in Molecular Biology, Volume 433. Humana Press; Totowa, NJ: 2009. pp. 33-53.

[0336] In an exemplary method for production of helper-dependent adenoviral vectors, a helper-dependent adenoviral genome can be delivered to cells that express a recombinase for excision of the conditional packaging sequence of a helper vector (e.g., 293 cells (HEK293) that expresses Cre recombinase), optionally where the helper-dependent adenoviral genome is delivered to the cells in a non-viral vector form, such as a bacterial plasmid form (e.g., where the helper-dependent adenoviral genome is present in a bacterial plasmid (pHDAd) and optionally liberated by restriction enzyme digestion). The same cells can be transduced with the helper genome including a packaging sequence flanked by recombinase sites (e.g., loxP sites), as described elsewhere herein. Thus, in various embodiments, producer cells can be transfected with the helper-dependent adenoviral genome and transduced with a helper genome bearing a packaging sequence or a functional fragment thereof flanked by recombinase sites (e.g., loxP sites), where the cells express a recombinase (e.g., Cre) corresponding to the recombinase sites such that excision of the packaging sequence or functional fragment thereof renders the helper virus genome deficient for packaging (e.g., unpackageable), but still able to provide all of the necessary trans-acting factors for production of helper-dependent adenoviral vector including the helper-dependent adenoviral genome. In various embodiments, a helper genome and a helper-dependent genome can each be independently delivered to a producer cell by any means known in the art, including without limitation by transfection, infection, or transduction (e.g., by a plasmid including the genome or by a vector including the genome).

[0337] Helper-dependent adenoviral vectors including a helper-dependent vector genome including a payload can be purified from producer cells. Helper-dependent adenoviral vectors can be further purified from helper vectors by physical means. In general, some contamination of helper vectors and/or helper genomes in helper-dependent adenoviral viral vectors and helper-dependent adenoviral viral vector formulations can occur and can be tolerated. However, minimizing such contamination and/or increasing purity of helper-dependent vector or genome preparations is a challenge in the art.

[0338] Helper-dependent adenoviral vectors present in a composition can be purified (e.g., purified from all a portion of helper vectors present in the composition) according to a variety of means known in the art. Various such means are based at least in part on differential mass or density of helper and helper-dependent adenoviral vectors and/or genomes, or of compositions including the same. In various embodiments, purification can be achieved by use of a density gradient (e.g., in a process of density gradient centrifugation, e.g., density gradient ultracentrifugation).

[0339] In certain particular embodiments, an exemplary density gradient that can be used in purifying helper-dependent adenoviral vectors is a cesium chloride (CsCl) gradient. Cesium chloride gradients and their use are known in the art. CsCl salt forms a density gradient when subjected to a strong centrifugal field. When the viruses are centrifuged to equilibrium in a CsCl salt, they are separated from contaminants and collected in bands on the basis of their buoyant densities. In certain particular embodiments, an exemplary density gradient that can be used in purifying helper-dependent adenoviral vectors is an iodixanol gradient. Methods of purification that include a density gradient can include one or more, or two or more, steps of ultracentrifugation.

[0340] To provide one non-limiting, exemplary protocol for purification of helper-dependent adenoviral vectors by cesium chloride density gradient purification by ultracentrifugation, viral lysate can be harvested from producer cells and applied to a continuous CsCl step gradient ranging from a density of around 1.4 g/ml at the bottom of the tube to 1.25 g/ml in the top layer. Without wishing to be bound by any particular theory, generalization, or exemplification, certain adenoviral helper-dependent vectors can have a buoyant density of about 1.34 g/ml and can separate from other (e.g. contaminating) agents to collect as a band in about the middle of the gradient after centrifugation. In various embodiments, a collected Ad band can be mixed with 1.35 g/ml CsCl solution and subjected to the second round of isopycnic gradient ultracentrifugation. A helper vector will be separable in the density gradient.

[0341] Vector purification can alternatively or additionally (e.g., before or after at least one round of density gradient purification) include purification by chromatography. In various embodiments, the chromatography is ion-exchange chromatography. In various embodiments, the chromatography is affinity chromatography. In various embodiments, the chromatography is gel filtration chromatography. In various embodiments, the chromatography is size-exclusion and/or hydrophobic interaction chromatography. In various embodiments the chromatography includes one or more or two or more steps of chromatography. Chromatography can be used in combination with ultracentrifugation and/or filtration. Vector purification can alternatively or additionally (e.g., after at least one round of density gradient purification) include purification by membrane adsorption.

[0342] Vector purification can alternatively or additionally (e.g., before or after at least one round of density gradient purification) include an iodixanol gradient for separating helper from helper dependent vectors. Certain exemplary iodixanol gradients are described, e.g., in Dormond et al. (2010 J. Virol. Meth. 165:83-89). In various embodiments, an exemplary purification process can include (1) anion-exchange chromatography for initial capturing of virus and (2) a shallow iodixanol density gradient ultracentrifugation for purification of helper-dependent virus, and can further include (3) size-exclusion chromatography for the removal of iodixanol and residual protein contaminants.

[0343] In various embodiments, a purified helper-dependent genome or helper-dependent vector is characterized in that it is present in a composition in which at least 96% (e.g., at least 96%, 96.5%, 97%, 97.5%, 98%, 98.5%, 99%, 99.1%, 99.2%, 99.3%, 99.4%, 99.5%, 99.6%, 99.7%, 99.8%, 99.9%, 99.95%, 99.99%, 99.995%, 99.999%, or 100%) of adenoviral genomes and/or adenoviral vectors present in the composition are helper-dependent adenoviral genomes and/or helper-dependent adenoviral vectors. In various embodiments, a purified helper-dependent genome or helper-dependent vector is characterized in that it is present in a composition in which at least 99% (e.g., at least 99%, 99.1%, 99.2%, 99.3%, 99.4%, 99.5%, 99.6%, 99.7%, 99.8%, 99.9%, 99.95%, 99.99%, 99.995%, 99.999%, or 100%) of adenoviral genomes and/or adenoviral vectors present in the composition are helper-dependent adenoviral genomes and/or helper-dependent adenoviral vectors. In various embodiments, a purified helper-dependent genome or helper-dependent vector is characterized in that it is present in a composition in which at least 99.9% (e.g., at least 99.9%, 99.95%, 99.99%, 99.995%, 99.999%, or 100%) of adenoviral genomes and/or adenoviral vectors present in the composition are helper-dependent adenoviral genomes and/or helper-dependent adenoviral vectors.

[0344] In various embodiments, a purified helper-dependent genome or helper-dependent vector is characterized in that it is present in a composition in which the percentage of adenoviral genomes and/or adenoviral vectors present in the composition that are helper-dependent adenoviral genomes and/or helper-dependent adenoviral vectors is in a range having a lower bound selected from 96%, 96.5%, 97%, 97.5%, 98%, 98.5%, 99%, 99.1%, 99.2%, 99.3%, 99.4%, 99.5%, 99.6%, 99.7%, 99.8%, or 99.9%, and an upper bound selected from 99%, 99.1%, 99.2%, 99.3%, 99.4%, 99.5%, 99.6%, 99.7%, 99.8%, 99.9%, 99.95%, 99.99%, 99.995%, 99.999%, or 100%. In various embodiments, a purified helper-dependent genome or helper-dependent vector is characterized in that it is present in a composition in which the percentage of adenoviral genomes and/or adenoviral vectors present in the composition that are helper-dependent adenoviral genomes and/or helper-dependent adenoviral vectors is between 98% and 100%, between 99% and 100%, between 99.5% and 100%, between 99.9% and 100%, or between 99.99% and 100%.

[0345] In various embodiments, a purified helper-dependent genome or helper-dependent vector is characterized in that it is present in a composition in which no more than 2% (e.g., no more than 2%, 1.5%, 1.0%, 0.9%, 0.8%, 0.7%, 0.6%, 0.5%, 0.4%, 0.3%, 0.2%, 0.1%, 0.05%, 0.01%, 0.005%, 0.001%, or 0%) of adenoviral genomes and/or adenoviral vectors present in the composition are helper adenoviral genomes and/or helper adenoviral vectors. In various embodiments, a purified helper-dependent genome or helper-dependent vector is characterized in that it is present in a composition in which no more than 1% (e.g., no more than 1.0%, 0.9%, 0.8%, 0.7%, 0.6%, 0.5%, 0.4%, 0.3%, 0.2%, 0.1%, 0.05%, 0.01%, 0.005%, 0.001%, or 0%) of adenoviral genomes and/or adenoviral vectors present in the composition are helper adenoviral genomes and/or helper adenoviral vectors. In various embodiments, a purified helper-dependent genome or helper-dependent vector is characterized in that it is present in a composition in which no more than 0.1% (e.g., no more than 0.1%, 0.05%, 0.01%, 0.005%, 0.001%, or 0%) of adenoviral genomes and/or adenoviral vectors present in the composition are helper adenoviral genomes and/or helper adenoviral vectors.

[0346] In various embodiments, a purified helper-dependent genome or helper-dependent vector is characterized in that it is present in a composition in which the percentage of adenoviral genomes and/or adenoviral vectors present in the composition that are helper adenoviral genomes and/or helper adenoviral vectors is in a range having an upper bound selected from 2%, 1.5%, 1.0%, 0.9%, 0.8%, 0.7%, 0.6%, 0.5%, 0.4%, 0.3%, 0.2%, 0.1%, 0.05%, 0.01%, and a lower bound selected from 0.5%, 0.4%, 0.3%, 0.2%, 0.1%, 0.05%, 0.01%, 0.005%, 0.001%, or 0%. In various embodiments, a purified helper-dependent genome or helper-dependent vector is characterized in that it is present in a composition in which the percentage of adenoviral genomes and/or adenoviral vectors present in the composition that are helper adenoviral genomes and/or helper adenoviral vectors is between 2% and 0%, between 1% and 0%, between 0.5% and 0%, between 0.1% and 0%, or between 0.01% and 0%.

[0347] In various embodiments, a composition in which a helper-dependent genome or helper dependent vector of the present disclosure is present is e.g., a liquid solution, e.g., a buffer, combination of excipients, pharmaceutically acceptable carrier, pharmaceutical composition, and/or a dosage form.

### EXAMPLES

[0348] The present disclosure includes the identification of positions within an adenoviral packaging sequence at which recombinase sites can be advantageously positioned to produce an adenoviral genome (e.g., a helper genome) conditionally deficient for packaging. Identification of these positions and genomes allows constructions of safer and/or more efficient helper-dependent adenoviral vectors and vector systems. The present Examples provide, among other things, the successful production and use of adenoviral genomes, including adenoviral helper genomes, provided herein, including adenoviral helper genomes that include a conditionally defective packaging sequence and/or an inverted packaging sequences.

### Example 1: Design of Ad35 Helper Genomes

[0349] The present Example includes the identification of positions within an Ad35 genome, and particularly within the Ad35 packaging sequence, at which recombinase sites can be positioned for efficient switching between packaging competence and packaging deficiency. Insertion or positioning of the recombinase sites into the packaging sequence will not abrogate Ad35 genome packaging. However, excision of the recombinase-flanked sequences will reduce and/or eliminates packaging of the genome.

[0350] The present Example includes alignment of adenoviral packaging sequences to identify putative packaging signals in the Ad35 genome, as shown in FIG. 1A. The present Example further includes selection of particular locations for placement of 5′ (left) and 3′ (right) recombinase sites. Selected left recombinase sites include Ad35 genome positions 224, 171, 195, and 161. Selected right recombinase sites include Ad35 genome positions 402, 479, and 497. The present Example further includes particular pairings of left and right recombinase site positions: position 224 with position 402, position 171 with position 402, position 195 with position 479, and position 161 with position 497 (e.g., in a genome where TAGGGATAACAGGGTAAT (SEQ ID NO: 29) is inserted in place of the canonical sequence corresponding to positions 481-497 in the Ad35 genome to create a recognition site for the restriction enzyme I-SceI). Insertion of a right recombinase site at Ad35 genome position 497 can alternatively be described as being at position 3200 (e.g., in a genome including an E1 deletion, such as a deletion of nucleotide positions 480-3199, 481-3199, or 482-3199).

[0351] These positions and pairing are shown in FIG. 1A, and are additionally described in the remainder of this Example.

### Exemplary Construct 1

[0352] Construct 1 includes recombinase sites positioned to generate a conditionally defective packaging sequence of an Ad35 helper genome. Inserted LoxP sites are shown in the context of nucleotides 1-402 of the reference Ad35 sequence in GenBank accession number AY128640. The LoxP sites flank a packaging sequence of the Ad35 genome so that Cre recombinase-mediated deletion of the flanked sequences will render the genome deficient for packaging. In the ITR, CTATCTAT (SEQ ID NO: 12) was used in place of the canonical CATCATCA (SEQ ID NO: 13) in the reference sequence, based on the publication by Wunderlich et al., J Gen Virol. 95:1574-1584 (2014). In addition, the sequence CCGGCC (SEQ ID NO: 14) was inserted to create a recognition site for the restriction enzyme FseI (TTATGGCCGGCCGGGTGGAGTTTTTTTGCAAGTTGTCGCGGGAAATGTTACGCATAA AAAGGCTTCTTTTCTCACGGAACTACTTAGTTTTCC) (SEQ ID NO: 15). Further sequence information is provided below.

### Sequence Corresponding to AY128640 Nucleotides 1-402 Engineered to Include a Conditionally Defective Packaging Sequence (LoxP Sequences Underlined)

(SEQ ID NO: 16)
CTATCTATATAATATACCTTATAGATGGAATGGTGCCAATATGTAAATG
AGGTGATTTTAAAAAGTGTGGGCCGTGTGGTGATTGGCTGTGGGGTTAA
CGGTTAAAAGGGGCGGCGCGGCCGTGGGAAAATGACGTTTTATGGCCGG
CCGGGTGGAGTTTTTTTGCAAGTTGTCGCGGGAAATGTTACGCATAAAA
AGGCTTCTTTTCTCACGGAACTACTTAGTTTTCCATAACTTCGTATAGC
ATACATTATACGAAGTTATCACGGTATTTAACAGGAAATGAGGTAGTTT
TGACCGGATGCAAGTGAAAATTGCTGATTTTCGCGCGAAAACTGAATGA
GGAAGTGTTTTTCTGAATAATGTGGTATTTATGGCAGGGTGGAGTATTT
GTTCAGGGCCAGGTAGACTTTGACCCATTACGTGGAGGTTTCGATTACC
GATAACTTCGTATAGCATACATTATACGAAGTTAT

[0353] Components of the above sequence are further described below.

### ITR (CTATCTAT (SEQ ID NO: 12) Sequence Used in Place of the Canonical CATCATCA (SEQ ID NO: 13) Underlined)

(SEQ ID NO: 17)
CTATCTATATAATATACCTTATAGATGGAATGGTGCCAATATGTAAATG
AGGTGATTTTAAAAAGTGTGGGCCGTGTGGTGATTGGCTGTGGGGTTAA
CGGTTAAAAGGGGCGGCGCGGCCGTGGGAAAATGACGTT

### LoxP Sequence

(SEQ ID NO: 18)
ATAACTTCGTATAGCATACATTATACGAAGTTAT

### LoxP-Flanked Sequence (Identified Packaging Signals A1, A2, A5 and A6 Underlined)

(SEQ ID NO: 19)
CACGGTATTTAACAGGAAATGAGGTAGTTTTGACCGGATGCAAGTGAAAA
TTGCTGATTTTCGCGCGAAAACTGAATGAGGAAGTGTTTTTCTGAATAAT
GTGGTATTTATGGCAGGGTGGAGTATTTGTTCAGGGCCAGGTAGACTTTG
ACCCATTACGTGGAGGTTTCGATTACCG

[0354] FIG. 2A shows a region (the left end) of an Ad35 helper genome that includes a sequence according to Construct 1.

### Exemplary Construct 2

[0355] Construct 2 includes recombinase sites positioned to generate a conditionally defective packaging sequence of an Ad35 helper genome. Inserted LoxP sites are shown in the context of nucleotides 1-402 of the reference Ad35 sequence in GenBank accession number AY128640. The LoxP sites flank a packaging sequence of the Ad35 genome so that Cre recombinase-mediated deletion of the flanked sequences will render the genome deficient for packaging. In the ITR, CTATCTAT (SEQ ID NO: 12) was used in place of the canonical CATCATCA (SEQ ID NO: 13) in the reference sequence, based on the publication by Wunderlich et al., J Gen Virol. 2014; 95:1574-1584. In addition, the sequence CCGGCC (SEQ ID NO: 14) was inserted to create a recognition site for the restriction enzyme FseI (TTATGGCCGGCCGGGTGGAGTTTTTTTGCAAGTIGTCGCG; SEQ ID NO: 20). Further sequence information is provided below.

### Sequence Corresponding to AY128640 Nucleotides 1-402 Engineered to Include a Conditionally Defective Packaging Sequence (LoxP Sequences Underlined)

(SEQ ID NO: 21)
CTATCTATATAATATACCTTATAGATGGAATGGTGCCAATATGTAAATGA
GGTGATTTTAAAAAGTGTGGGCCGTGTGGTGATTGGCTGTGGGGTTAACG
GTTAAAAGGGGCGGCGCGGCCGTGGGAAAATGACGTTTTATGGCCGGCCG
GGTGGAGTTTTTTTGCAAGTTGTCGCGATAACTTCGTATAGCATACATTA
TACGAAGTTATGGAAATGTTACGCATAAAAAGGCTTCTTTTCTCACGGAA
CTACTTAGTTTTCCCACGGTATTTAACAGGAAATGAGGTAGTTTTGACCG
GATGCAAGTGAAAATTGCTGATTTTCGCGCGAAAACTGAATGAGGAAGTG
TTTTTCTGAATAATGTGGTATTTATGGCAGGGTGGAGTATTTGTTCAGGG
CCAGGTAGACTTTGACCCATTACGTGGAGGTTTCGATTACCGATAACTTC
GTATAGCATACATTATACGAAGTTAT

[0356] Components of the above sequence are further described below.

### ITR (CTATCTAT (SEQ ID NO: 12) Sequence Used in Place of the Canonical CATCATCA (SEQ ID NO: 13) Underlined)

(SEQ ID NO: 17)
CTATCTATATAATATACCTTATAGATGGAATGGTGCCAATATGTAAATGA
GGTGATTTTAAAAAGTGTGGGCCGTGTGGTGATTGGCTGTGGGGTTAACG
GTTAAAAGGGGCGGCGCGGCCGTGGGAAAATGACGTT

### LoxP Sequence

(SEQ ID NO: 18)
ATAACTTCGTATAGCATACATTATACGAAGTTAT

### LoxP-Flanked Sequence (Identified Packaging Signals A1, A2, A5 and A6 Underlined)

(SEQ ID NO: 22)
GGAAATGTTACGCATAAAAAGGCTTCTTTTCTCACGGAACTACTTAGTT
TTCCCACGGTATTTAACAGGAAATGAGGTAGTTTTGACCGGATGCAAGT
GAAAATTGCTGATTTTCGCGCGAAAACTGAATGAGGAAGTGTTTTTCTG
AATAATGTGGTATTTATGGCAGGGTGGAGTATTTGTTCAGGGCCAGGTA
GACTTTGACCCATTACGTGGAGGTTTCGATTACCG

[0357] FIG. 2B shows a region (the left end) of an Ad35 helper genome that includes a sequence according to Construct 2.

### Exemplary Construct 3

[0358] Construct 3 includes recombinase sites positioned to generate a conditionally defective packaging sequence of an Ad35 helper genome. Inserted LoxP sites are shown in the context of nucleotides 1-479 of the reference Ad35 sequence in GenBank accession number AY128640. The LoxP sites flank a packaging sequence of the Ad35 genome so that Cre recombinase-mediated deletion of the flanked sequences will render the genome deficient for packaging. In the ITR, CTATCTAT (SEQ ID NO: 12) was used in place of the canonical CATCATCA (SEQ ID NO: 13) in the reference sequence, based on the publication by Wunderlich et al., J Gen Virol. 95:1574-1584 (2014). In addition, the sequence CCGGCC (SEQ ID NO: 14) was inserted to create a recognition site for the restriction enzyme FseI (TTATGGCCGGCCGGGTGGAGTTTTTTTGCAAGTIGTCGCGGGAAATGTTACGCATAA AAAGGCT; SEQ ID NO: 23). Further sequence information is provided below.

### Sequence Corresponding to AY128640 Nucleotides 1-479 Engineered to Include a Conditionally Defective Packaging Sequence (LoxP Sequences Underlined)

(SEQ ID NO: 24)
CTATCTATATAATATACCTTATAGATGGAATGGTGCCAATATGTAAATG
AGGTGATTTTAAAAAGTGTGGGCCGTGTGGTGATTGGCTGTGGGGTTAA
CGGTTAAAAGGGGCGGCGCGGCCGTGGGAAAATGACGTTTTATGGCCGG
CCGGGTGGAGTTTTTTTGCAAGTTGTCGCGGGAAATGTTACGCATAAAA
AGGCTATAACTTCGTATAGCATACATTATACGAAGTTATTCTTTTCTCA
CGGAACTACTTAGTTTTCCCACGGTATTTAACAGGAAATGAGGTAGTTT
TGACCGGATGCAAGTGAAAATTGCTGATTTTCGCGCGAAAACTGAATGA
GGAAGTGTTTTTCTGAATAATGTGGTATTTATGGCAGGGTGGAGTATTT
GTTCAGGGCCAGGTAGACTTTGACCCATTACGTGGAGGTTTCGATTACC
GTGTTTTTTACCTGAATTTCCGCGTACCGTGTCAAAGTCTTCTGTTTTT
ACGTAGGTGTCAGCTGATCGCTAGGGTATATAACTTCGTATAGCATACA
TTATACGAAGTTAT

[0359] Components of the above sequence are further described below.

### ITR (CTATCTAT (SEQ ID NO: 12) Sequence Used in Place of the Canonical CATCATCA (SEQ ID NO: 13) Underlined)

(SEQ ID NO: 17)
CTATCTATATAATATACCTTATAGATGGAATGGTGCCAATATGTAAATG
AGGTGATTTTAAAAAGTGTGGGCCGTGTGGTGATTGGCTGTGGGGTTAA
CGGTTAAAAGGGGCGGCGCGGCCGTGGGAAAATGACGTT

### LoxP Sequence

(SEQ ID NO: 18)
ATAACTTCGTATAGCATACATTATACGAAGTTAT

### LoxP-Flanked Sequence (Identified Packaging Signals A1, A2, A5 and A6 Underlined)

(SEQ ID NO: 25)
TCTTTTCTCACGGAACTACTTAGTTTTCCCACGGTATTTAACAGGAAAT
GAGGTAGTTTTGACCGGATGCAAGTGAAAATTGCTGATTTTCGCGCGAA
AACTGAATGAGGAAGTGTTTTTCTGAATAATGTGGTATTTATGGCAGGG
TGGAGTATTTGTTCAGGGCCAGGTAGACTTTGACCCATTACGTGGAGGT
TTCGATTACCGTGTTTTTTACCTGAATTTCCGCGTACCGTGTCAAAGTC
TTCTGTTTTTACGTAGGTGTCAGCTGATCGCTAGGGTAT

[0360] FIG. 2C shows a region (the left end) of an Ad35 helper genome that includes a sequence according to Construct 3.

### Exemplary Construct 4

[0361] Construct 4 includes recombinase sites positioned to generate a conditionally defective packaging sequence of an Ad35 helper genome. Inserted LoxP sites are shown in the context of nucleotides 1-497 of the reference Ad35 sequence in GenBank accession number AY128640. The LoxP sites flank a packaging sequence of the Ad35 genome so that Cre recombinase-mediated deletion of the flanked sequences will render the genome deficient for packaging. In the ITR, CTATCTAT (SEQ ID NO: 12) was used in place of the canonical CATCATCA (SEQ ID NO: 13) in the reference sequence, based on the publication by Wunderlich et al., J Gen Virol. 95:1574-1584 (2014). In addition, the sequence CCGGCC (SEQ ID NO: 14) was inserted to create a recognition site for the restriction enzyme FseI (TTATGGCCGGCCGGGTGGAGTTTTTTTGCA; SEQ ID NO: 26). Further sequence information is provided below.

### Sequence Corresponding to AY128640 Nucleotides 1-480 Engineered to Include a Conditionally Defective Packaging Sequence (LoxP Sequences Underlined)

(SEQ ID NO: 27)
CTATCTATATAATATACCTTATAGATGGAATGGTGCCAATATGTAAATG
AGGTGATTTTAAAAAGTGTGGGCCGTGTGGTGATTGGCTGTGGGGTTAA
CGGTTAAAAGGGGCGGCGCGGCCGTGGGAAAATGACGTTTTATGGCCGG
CCGGGTGGAGTTTTTTTGCAATAACTTCGTATAGCATACATTATACGAA
GTTATAGTTGTCGCGGGAAATGTTACGCATAAAAAGGCTTCTTTTCTCA
CGGAACTACTTAGTTTTCCCACGGTATTTAACAGGAAATGAGGTAGTTT
TGACCGGATGCAAGTGAAAATTGCTGATTTTCGCGCGAAAACTGAATGA
GGAAGTGTTTTTCTGAATAATGTGGTATTTATGGCAGGGTGGAGTATTT
GTTCAGGGCCAGGTAGACTTTGACCCATTACGTGGAGGTTTCGATTACC
GTGTTTTTTACCTGAATTTCCGCGTACCGTGTCAAAGTCTTCTGTTTTT
ACGTAGGTGTCAGCTGATCGCTAGGGTATTTAGGGATAACAGGGTAATA
TAACTTCGTATAGCATACATTATACGAAGTTAT

[0362] Components of the above sequence are further described below.

### ITR (CTATCTAT (SEQ ID NO: 12) Sequence Used in Place of the Canonical CATCATCA (SEQ ID NO: 13) Underlined)

(SEQ ID NO: 17)
CTATCTATATAATATACCTTATAGATGGAATGGTGCCAATATGTAAATG
AGGTGATTTTAAAAAGTGTGGGCCGTGTGGTGATTGGCTGTGGGGTTAA
CGGTTAAAAGGGGCGGCGCGGCCGTGGGAAAATGACGTT

### LoxP Sequence

(SEQ ID NO: 18)
ATAACTTCGTATAGCATACATTATACGAAGTTAT

### LoxP-Flanked Sequence (Identified Packaging Signals A1, A2, A5 and A6 Underlined; Sequence Inserted in Place of a Deletion of Base Pairs 481-497 Bold and Italicized)

(SEQ ID NO: 28)
AGTTGTCGCGGGAAATGTTACGCATAAAAAGGCTTCTTTTCTCACGGAAC
TACTTAGTTTTCCCACGGTATTTAACAGGAAATGAGGTAGTTTTGACCGG
ATGCAAGTGAAAATTGCTGATTTTCGCGCGAAAACTGAATGAGGAAGTGT
TTTTCTGAATAATGTGGTATTTATGGCAGGGTGGAGTATTTGTTCAGGGC
CAGGTAGACTTTGACCCATTACGTGGAGGTTTCGATTACCGTGTTTTTTA
CCTGAATTTCCGCGTACCGTGTCAAAGTCTTCTGTTTTTACGTAGGTGTC
AGCTGATCGCTAGGGTATTTAGGGATAACAGGGTAAT

[0363] FIG. 2D shows a region (the left end) of an Ad35 helper genome that includes a sequence according to Construct 4.

### Example 2: Analysis of Ad35 Helper Genome Propagation and Stability

[0364] The present Example demonstrates that Ad35 helper genomes including recombinase-flanked packaging sequences according to the present disclosure are stable and can be propagated without detectable genome rearrangement.

[0365] A helper genome can be present in a plasmid or in a viral vector. Plasmid forms can be used to transfect target cells for production of helper vectors (which helper vectors include the Ad35 helper genome) or for production of donor vectors (which donor vectors do not include the Ad35 helper genome). Four plasmids encoding E1-deleted Ad35 helper genomes (designated pEN025, pEN026, pEN027, and pEN028), were each transfected into HEK293 cells and propagated to determine whether viable helper viruses could be rescued. Each of pEN025, pEN026, pEN027, and pEN028 included a construct according to Constructs 1˜4 in Example 1, respectively.

[0366] Rescued E1-deleted adenoviruses were purified using standard methods (see, e.g., Su et al. doi:10.1101/pdb.prot095547 Cold Spring Harb Protoc 2019) and viral genomes were isolated from purified helper vectors. Isolated Ad35 helper genomes were digested with BsrGI alone, and starting plasmids were digested with BsrGI and SwaI (which excises the plasmid backbone sequence) for comparison. Digestion products were analyzed by gel electrophoresis (FIG. 3).

[0367] To determine whether the Ad35 helper genomes were stable during propagation the restriction patterns obtained by digesting isolated adenoviral genomic DNA were compared to the restriction patterns obtained by digesting starting plasmids with the restriction enzymes BsrG1 and SwaI. Analysis of the restriction patterns on a gel showed the expected banding pattern and expected band sizes (FIG. 3), demonstrating that that Ad35 helper genomes including recombinase-flanked packaging sequences as disclosed herein are genetically stable and can be propagated without detectable genome rearrangement in large-scale preparations.

### Example 3: Analysis of Recombinase-Mediated Excision of Recombinase-Flanked Packaging Sequences in Ad35 Helper Genomes

[0368] The present Example demonstrates the recombinase-mediated deletion of recombinase-flanked packaging sequences in Ad35 helper genomes. Plasmids including Ad35 helper genomes (pEN025, pEN026, pEN027, and pEN028) were linearized by digestion with SwaI (which excised the plasmid backbone sequence) and transfected into each of two cell types: HEK293 cells that do not express Cre recombinase, and 116 cells modified from HEK293 cells to express Cre recombinase. Thus, excision of loxP flanked sequences is expected in the 116 cells but not the HEK293 cells. DNA was isolated from transfected cells and digested with the restriction enzyme ApaI. Digestion of the Ad35 helper genome with restriction enzyme ApaI is expected to produce a 2014 bp fragment. A smaller DNA fragment is expected if the Ad35 helper genome has undergone recombination to mediate deletion of the recombinase-flanked packaging sequence. Restriction results were analyzed by gel electrophoresis (FIG. 4). The expected band sizes were observed for DNA isolated from HEK293 cells transfected with the Ad35 helper genomes (FIG. 4—lanes 2, 4, 6, and 8) and for DNA isolated from 116 cells transfected with the Ad35 helper genomes (FIG. 4—lanes 3, 5, 7, and 9). Data therefore show successful Cre-mediated excision of flanked packaging sequences from all helper genomes in the presence of recombinase.

### Example 4: Analysis of Helper-Dependent Adenovirus (HDAd) Production Using Ad35 Helper Vectors with Genomes Including Recombinase-Flanked Packaging Sequences

[0369] The present Example demonstrates the production of helper-dependent adenovirus (HDAd) using Ad35 helper vectors with genomes including recombinase-flanked packaging sequences. Ad35 helper vectors were purified from HEK293 cells transfected with plasmids including Ad35 helper genomes with recombinase-flanked packaging sequences (pEN025, pEN026, pEN027, and pEN028, and pEN024). Helper-dependent adenoviral vectors were then produced according to standard procedures (see Palmer and Ng, Methods Mol Biol. 2008; 433:33-53) in 116 cells using the purified Ad35 helper vectors and transfecting plasmid 5427, a plasmid that encodes a helper-dependent genome that includes terminal sequences derived from Ad35 and includes a cassette for expression of beta-galactosidase (FIG. 5). HDAd viral particles produced using Ad35 helper vectors from pEN026 and pEN028 were isolated and subsequently used to achieve production of secondary HDAd preparations by co-infection of 116 cells with the HDAd viral particles from plasmid 5427 and Ad35 helper viral particles from pEN026 or pEN028 (respectively).

[0370] Helper-dependent adenovirus (HDAd) preparations were purified by using two consecutive cesium chloride continuous gradients (FIG. 6A-E). Purified HDAd preparations were characterized using several approaches. The physical titer or yield of the purified virus preparations was determined by spectrophotometry and can be expressed as the total number of purified viral particles (vp) or the number of viral particles per volume (vp/ml). The infectivity of the purified HDAd preparations was determined by using the purified helper-dependent viruses to infect cultured HEK293 cells and staining the cells to determine their expression of beta-galactosidase (as described in Parks et al., PNAS. 1996: 93(24):13565-13570). Infected cells were expected to express beta-galactosidase. Infectivity was represented in terms of blue-forming units (BFU), which is the number of cells that showing blue staining indicating positive expression of beta-galactosidase encoded by the cassette in HDAd genome. Infectivity can be further represented as the BFU per volume of purified virus (BFU/ml) and/or the ratio between the total number of viral particles and the BFU (vp:BFU).

[0371] Further characterization of the purified HDAd preparations was performed using DNA isolated from the purified HDAd preparations. Isolated DNA was digested using restriction enzyme (SacII) and the restriction pattern was compared to the restriction pattern obtained by digestion using restriction enzymes (SacII and PmeI) of the starting HDAd plasmid and the restriction pattern obtained by digestion using restriction enzymes (SacII and SwaI for pEN025, pEN026, pEN027, and pEN028; or SacII and PmeI for pEN024) of the starting Ad35 helper plasmids. Analysis of the restriction patterns on a gel showed the expected banding pattern and expected band sizes (FIG. 7A-C), indicating successful HDAd production. While in FIGS. 7A and 7B the restriction patterns of the HDAd preparations demonstrate a low level of helper virus contamination, in FIG. 7C, the banding pattern in lane 4 demonstrates comparatively greater helper virus contamination. The HDAd preparation examined in FIG. 7C was prepared using Ad35 helper vectors produced using a plasmid (pEN024) encoding an Ad35 helper vector genome that includes the construct of FIG. 2E. Notwithstanding, vectors, genomes, and conditional packaging sequences analyzed in FIGS. 7A-C are advantageous and useful for various methods and compositions provided herein. Additionally, the Ad35 helper contamination fraction in the purified preparation was determined using quantitative PCR of DNA isolated from the purified HDAd preparation.

[0372] Table 36 shows the results from experiments to characterize the purified HDAd preparations. Table 37 shows results from secondary preparations, including estimated helper fraction (%).

TABLE 36
Characterization of Purified HDAd Preparations

| Helper | | Yield | Yield | Infectivity | Infectivity | Helper fraction |
|---|---|---|---|---|---|---|
| plasmid | Construct | (vp) | (vp/ml) | (BFU/ml) | (vp:BFU) | (%) |
| pEN025 | Construct 1 | 2.54e12 | 7.9e11 | 5.39e10 | 14.7:1 | 8.99 |
| pEN026 | Construct 2 | 3.59e12 | 1.25e12 | 1.05e11 | 11.9:1 | 8.10 |
| pEN027# | Construct 3 | 2.73e12 | 1.06e12 | 4.59e10 | 21.4:1 | 5.93 |
| pEN028 | Construct 4 | 2.43e12 | 9.51e11 | 7.22e11 | 13.2:1 | 7.05 |
| pEN024 | | 1.32e13 | 2.28e12 | 2.29e10 | 99.6:1 | 89.2 |

“#” indicates that evidence of genome rearrangement was observed in HDAd preparations generated using this helper plasmid (indicated by band below asterisk in FIG. 7B).

[0373] Notwithstanding, vectors, genomes, and conditional packaging sequences associated with such helper plasmids can be advantageous and useful for certain methods and compositions provided herein.

TABLE 37
Characterization of Secondary HDAd Preparations

| | | | | Helper |
|---|---|---|---|---|
| Helper | | Yield | Infectivity | fraction |
| plasmid | Construct | (vp) | (vp:BFU) | (%) |
| pEN026 | Construct 2 | 6.66e12 | 8.35:1 | 2.9 |
| pEN028 | Construct 4 | 3.82e12 | 7.86:1 | 3.1 |

### Example 5: Design of Ad35 Helper Genomes Including Inverted Packaging Sequences

[0374] The present Example demonstrates the design of Ad35 helper genomes that include inverted packaging sequences. The present Example is based at least in part on the recognition that use of an inverted packaging sequence in an Ad35 helper vector can reduce and/or eliminate recombinase site-excising homologous recombination (compare FIG. 8A and FIG. 8B). Inversion of sequences comprising a conditionally defective packaging sequence—thereby generating an inverted recombinase-flanked packaging sequences—will reduce and/or eliminate recombinase site-excising homologous recombination, as shown in FIG. 8B. Sequence elements included within an inverted sequence are herein referred to as inverted sequence elements (e.g., a recombinase-flanked packaging sequence included within an inverted sequence is referred to as an inverted recombinase-flanked packaging sequence). A person of skill in the art would appreciate from the present disclosure that the orientation of the packaging sequence is not critical to its function (see, e.g., Palmer and Ng, Mol Ther. 2003; 8:8460852) and would further appreciate from the present disclosure that an inverted conditionally defective packaging sequence as disclosed herein is packaging competent. An inverted recombinase site flanked packaging sequence can further be excised by recombination upon contact with a corresponding recombinase and prevent packaging of a helper genome.

[0375] The present Example particularly includes Ad35 helper genomes including inverted packaging sequences as set forth below.

### Exemplary Construct 5

[0376] Construct 5 (FIG. 9A) corresponds to Construct 1 (FIG. 2A) but includes a packaging sequence inversion. The inverted recombinase-flanked packing sequence is shown in the context of nucleotides 1-497 of the reference Ad35 sequence in GenBank accession number AY128640. Positions of inserted sequence elements are identified based on their correspondence with positions of the reference Ad35 genome sequence, including if present in Construct 5 in an inverted orientation. Two inserted LoxP sites—one at position 224 and the other at position 402—flank a packaging sequence of the Ad35 genome, so that Cre recombinase-mediated deletion of the flanked packaging sequence will render the genome deficient for packaging. The sequence TAGGGATAACAGGGTAAT (SEQ ID NO: 29) was inserted in place of a deletion of base pairs 481-497 to create a recognition site for the restriction enzyme I-SceI. In addition, the sequence CCGGCC (SEQ ID NO: 14) was inserted at position 143 to create a first recognition site for the restriction enzyme FseI, and the sequence GGCCGGCC (SEQ ID NO: 30) was inserted at position 497 to create a second recognition site for the restriction enzyme FseI. An inverted recombinase-flanked packing sequence was generated by inversion of a sequence comprising the recombinase-flanked packaging sequence. The inverted sequence for Construct 5 includes the sequence flanked by the two FseI sites at positions 143 and 497-which includes the two LoxP sites, the recombinase-flanked packaging sequence, and the I-SceI recognition site. The inverted LoxP sites flank the inverted recombinase-flanked packaging sequence of the Ad35 genome so that Cre recombinase-mediated deletion of the flanked sequences will render the genome deficient for packaging. In the ITR, CTATCTAT (SEQ ID NO: 12) was used in place of the canonical CATCATCA (SEQ ID NO: 13) in the reference sequence, based on the publication by Wunderlich et al., J Gen Virol. 95:1574-1584 (2014). FIG. 9A shows a region of an Ad35 helper genome that includes Construct 5. Sequence information is provided below.

### Sequence Corresponding to AY128640 Nucleotides 1-497 Engineered to Include an Inverted Recombinase-Flanked Packing Sequence (Inverted Sequence Underlined; FseI Recognition Sites Bold and Italicized)

(SEQ ID NO: 31)
CTATCTATATAATATACCTTATAGATGGAATGGTGCCAATATGTAAATG
AGGTGATTTTAAAAAGTGTGGGCCGTGTGGTGATTGGCTGTGGGGTTAA
CGGTTAAAAGGGGCGGCGCGGCCGTGGGAAAATGACGTTTTATGGCCGG
CCATTACCCTGTTATCCCTAAATACCCTAGCGATCAGCTGACACCTACG
TAAAAACAGAAGACTTTGACACGGTACGCGGAAATTCAGGTAAAAAACA
ATAACTTCGTATAATGTATGCTATACGAAGTTATCGGTAATCGAAACCT
CCACGTAATGGGTCAAAGTCTACCTGGCCCTGAACAAATACTCCACCCT
GCCATAAATACCACATTATTCAGAAAAACACTTCCTCATTCAGTTTTCG
CGCGAAAATCAGCAATTTTCACTTGCATCCGGTCAAAACTACCTCATTT
CCTGTTAAATACCGTGATAACTTCGTATAATGTATGCTATACGAAGTTA
TGGAAAACTAAGTAGTTCCGTGAGAAAAGAAGCCTTTTTATGCGTAACA
TTTCCCGCGACAACTTGCAAAAAAACTCCACCCGGCCGGCC

[0377] Components of the above sequence are further described below.

### ITR (CTATCTAT (SEQ ID NO: 12) Sequence Used in Place of the Canonical CATCATCA (SEQ ID NO: 13) Underlined)

(SEQ ID NO: 17)
CTATCTATATAATATACCTTATAGATGGAATGGTGCCAATATGTAAATG
AGGTGATTTTAAAAAGTGTGGGCCGTGTGGTGATTGGCTGTGGGGTTAA
CGGTTAAAAGGGGCGGCGCGGCCGTGGGAAAATGACGTT

### Inverted LoxP Sequence

(SEQ ID NO: 1)
ATAACTTCGTATAATGTATGCTATACGAAGTTAT

### Inverted Sequence (Inverted LoxP Sequences Underlined; Inverted Recombinase-Flanked Packaging Sequence Bold and Italicized)

(SEQ ID NO: 32)
ATTACCCTGTTATCCCTAAATACCCTAGCGATCAGCTGACACCTACGTA
AAAACAGAAGACTTTGACACGGTACGCGGAAATTCAGGTAAAAAACAAT
AACTTCGTATAATGTATGCTATACGAAGTTATCGGTAATCGAAACCTCC
ACGTAATGGGTCAAAGTCTACCTGGCCCTGAACAAATACTCCACCCTGC
CATAAATACCACATTATTCAGAAAAACACTTCCTCATTCAGTTTTCGCG
CGAAAATCAGCAATTTTCACTTGCATCCGGTCAAAACTACCTCATTTCC
TGTTAAATACCGTGATAACTTCGTATAATGTATGCTATACGAAGTTATG
GAAAACTAAGTAGTTCCGTGAGAAAAGAAGCCTTTTTATGCGTAACATT
TCCCGCGACAACTTGCAAAAAAACTCCACCC

### Inverted Recombinase-Flanked Packaging Sequence (Identified Inverted Packaging Signals A1, A2, A5 and A6 Underlined)

(SEQ ID NO: 33)
CGGTAATCGAAACCTCCACGTAATGGGTCAAAGTCTACCTGGCCCTGAA
CAAATACTCCACCCTGCCATAAATACCACATTATTCAGAAAAACACTTC
CTCATTCAGTTTTCGCGCGAAAATCAGCAATTTTCACTTGCATCCGGTC
AAAACTACCTCATTTCCTGTTAAATACCGTG

### Exemplary Construct 6

[0378] Construct 6 (FIG. 9B) corresponds to Construct 1 (FIG. 2B) but includes a packaging sequence inversion. The inverted recombinase-flanked packing sequence is shown in the context of nucleotides 1-497 of the reference Ad35 sequence in GenBank accession number AY128640. Positions of inserted sequence elements are identified based on their correspondence with positions of the reference Ad35 genome sequence, including if present in Construct 6 in an inverted orientation. Two inserted LoxP sites—one at position 171 and the other at position 402—flank a packaging sequence of the Ad35 genome, so that Cre recombinase-mediated deletion of the flanked packaging sequence will render the genome deficient for packaging. The sequence TAGGGATAACAGGGTAAT (SEQ ID NO: 29) was inserted in place of a deletion of base pairs 481-497 to create a recognition site for the restriction enzyme I-SceI. In addition, the sequence CCGGCC (SEQ ID NO: 14) was inserted at position 143 to create a first recognition site for the restriction enzyme FseI, and the sequence GGCCGGCC (SEQ ID NO: 30) was inserted at position 497 to create a second recognition site for the restriction enzyme FseI. An inverted recombinase-flanked packing sequence was generated by inversion of a sequence comprising the recombinase-flanked packaging sequence. The inverted sequence for Construct 6 includes the sequence flanked by the two FseI sites at positions 143 and 497—which includes the two LoxP sites, the recombinase-flanked packaging sequence, and the I-SceI recognition site. The inverted LoxP sites flank the inverted recombinase-flanked packaging sequence of the Ad35 genome so that Cre recombinase-mediated deletion of the flanked sequences will render the genome deficient for packaging. In the ITR, CTATCTAT (SEQ ID NO: 12) was used in place of the canonical CATCATCA (SEQ ID NO: 13) in the reference sequence, based on the publication by Wunderlich et al., J Gen Virol. 95:1574-1584 (2014). FIG. 9B shows a region of an Ad35 helper genome that includes Construct 6. Sequence information is provided below.

### Sequence Corresponding to AY128640 Nucleotides 1-497 Engineered to Include an Inverted Recombinase-Flanked Packing Sequence (Inverted Sequence Underlined; FseI Recognition Sites Bold and Italicized)

(SEQ ID NO: 34)
CTATCTATATAATATACCTTATAGATGGAATGGTGCCAATATGTAAATGA
GGTGATTTTAAAAAGTGTGGGCCGTGTGGTGATTGGCTGTGGGGTTAACG
GTTAAAAGGGGCGGCGCGGCCGTGGGAAAATGACGTTTTATGGCCGGCCA
TTACCCTGTTATCCCTAAATACCCTAGCGATCAGCTGACACCTACGTAAA
AACAGAAGACTTTGACACGGTACGCGGAAATTCAGGTAAAAAACAATAAC
TTCGTATAATGTATGCTATACGAAGTTATCGGTAATCGAAACCTCCACGT
AATGGGTCAAAGTCTACCTGGCCCTGAACAAATACTCCACCCTGCCATAA
ATACCACATTATTCAGAAAAACACTTCCTCATTCAGTTTTCGCGCGAAAA
TCAGCAATTTTCACTTGCATCCGGTCAAAACTACCTCATTTCCTGTTAAA
TACCGTGGGAAAACTAAGTAGTTCCGTGAGAAAAGAAGCCTTTTTATGCG
TAACATTTCCATAACTTCGTATAATGTATGCTATACGAAGTTATCGCGAC
AACTTGCAAAAAAACTCCACCCGGCCGGCC

[0379] Components of the above sequence are further described below.

### ITR (CTATCTAT (SEQ ID NO: 12) Sequence Used in Place of the Canonical CATCATCA (SEQ ID NO: 13) Underlined)

(SEQ ID NO: 17)
CTATCTATATAATATACCTTATAGATGGAATGGTGCCAATATGTAAATGA
GGTGATTTTAAAAAGTGTGGGCCGTGTGGTGATTGGCTGTGGGGTTAACG
GTTAAAAGGGGCGGCGCGGCCGTGGGAAAATGACGTT

### Inverted LoxP Sequence

(SEQ ID NO: 1)
ATAACTTCGTATAATGTATGCTATACGAAGTTAT

### Inverted Sequence (Inverted LoxP Sequences Underlined; Inverted Recombinase-Flanked Packaging Sequence Bold and Italicized)

(SEQ ID NO: 35)
ATTACCCTGTTATCCCTAAATACCCTAGCGATCAGCTGACACCTACGTAA
AAACAGAAGACTTTGACACGGTACGCGGAAATTCAGGTAAAAAACAATAA
CTTCGTATAATGTATGCTATACGAAGTTATCGGTAATCGAAACCTCCACG
TAATGGGTCAAAGTCTACCTGGCCCTGAACAAATACTCCACCCTGCCATA
AATACCACATTATTCAGAAAAACACTTCCTCATTCAGTTTTCGCGCGAAA
ATCAGCAATTTTCACTTGCATCCGGTCAAAACTACCTCATTTCCTGTTAA
ATACCGTGGGAAAACTAAGTAGTTCCGTGAGAAAAGAAGCCTTTTTATGC
GTAACATTTCCATAACTTCGTATAATGTATGCTATACGAAGTTATCGCGA
CAACTTGCAAAAAAACTCCACCC

### Inverted Recombinase-Flanked Packaging Sequence (Identified Inverted Packaging Signals A1, A2, A5 and A6 Underlined)

(SEQ ID NO: 36)
CGGTAATCGAAACCTCCACGTAATGGGTCAAAGTCTACCTGGCCCTGAAC
AAATACTCCACCCTGCCATAAATACCACATTATTCAGAAAAACACTTCCT
CATTCAGTTTTCGCGCGAAAATCAGCAATTTTCACTTGCATCCGGTCAAA
ACTACCTCATTTCCTGTTAAATACCGTGGGAAAACTAAGTAGTTCCGTGA
GAAAAGAAGCCTTTTTATGCGTAACATTTCC

### Exemplary Construct 7

[0380] Construct 7 (FIG. 9C) corresponds to Construct 1 (FIG. 2C) but includes a packaging sequence inversion. The inverted recombinase-flanked packing sequence is shown in the context of nucleotides 1-497 of the reference Ad35 sequence in GenBank accession number AY128640. Positions of inserted sequence elements are identified based on their correspondence with positions of the reference Ad35 genome sequence, including if present in Construct 7 in an inverted orientation. Two inserted LoxP sites—one at position 195 and the other at position 479—flank a packaging sequence of the Ad35 genome, so that Cre recombinase-mediated deletion of the flanked packaging sequence will render the genome deficient for packaging. The sequence TAGGGATAACAGGGTAAT (SEQ ID NO: 29) was inserted in place of a deletion of base pairs 481-497 to create a recognition site for the restriction enzyme I-SceI. In addition, the sequence CCGGCC (SEQ ID NO: 14) was inserted at position 143 to create a first recognition site for the restriction enzyme FseI, and the sequence GGCCGGCC (SEQ ID NO: 30) was inserted at position 497 to create a second recognition site for the restriction enzyme FseI. An inverted recombinase-flanked packing sequence was generated by inversion of a sequence comprising the recombinase-flanked packaging sequence. The inverted sequence for Construct 7 includes the sequence flanked by the two FseI sites at positions 143 and 497-which includes the two LoxP sites, the recombinase-flanked packaging sequence, and the I-SceI recognition site. The inverted LoxP sites flank the inverted recombinase-flanked packaging sequence of the Ad35 genome so that Cre recombinase-mediated deletion of the flanked sequences will render the genome deficient for packaging. In the ITR, CTATCTAT (SEQ ID NO: 12) was used in place of the canonical CATCATCA (SEQ ID NO: 13) in the reference sequence, based on the publication by Wunderlich et al., J Gen Virol. 95:1574-1584 (2014). FIG. 9C shows a region of an Ad35 helper genome that includes Construct 7. Sequence information is provided below.

### Sequence Corresponding to AY128640 Nucleotides 1-497 Engineered to Include an Inverted Recombinase-Flanked Packing Sequence (Inverted Sequence Underlined; FseI Recognition Sites Bold and Italicized)

(SEQ ID NO: 37)
CTATCTATATAATATACCTTATAGATGGAATGGTGCCAATATGTAAATGA
GGTGATTTTAAAAAGTGTGGGCCGTGTGGTGATTGGCTGTGGGGTTAACG
GTTAAAAGGGGCGGCGCGGCCGTGGGAAAATGACGTTTTATGGCCGGCCA
TTACCCTGTTATCCCTAAATAACTTCGTATAATGTATGCTATACGAAGTT
ATATACCCTAGCGATCAGCTGACACCTACGTAAAAACAGAAGACTTTGAC
ACGGTACGCGGAAATTCAGGTAAAAAACACGGTAATCGAAACCTCCACGT
AATGGGTCAAAGTCTACCTGGCCCTGAACAAATACTCCACCCTGCCATAA
ATACCACATTATTCAGAAAAACACTTCCTCATTCAGTTTTCGCGCGAAAA
TCAGCAATTTTCACTTGCATCCGGTCAAAACTACCTCATTTCCTGTTAAA
TACCGTGGGAAAACTAAGTAGTTCCGTGAGAAAAGAATAACTTCGTATAA
TGTATGCTATACGAAGTTATAGCCTTTTTATGCGTAACATTTCCCGCGAC
AACTTGCAAAAAAACTCCACCCGGCCGGCC

[0381] Components of the above sequence are further described below.

### ITR (CTATCTAT (SEQ ID NO: 12) Sequence Used in Place of the Canonical CATCATCA (SEQ ID NO: 13) Underlined)

(SEQ ID NO: 17)
CTATCTATATAATATACCTTATAGATGGAATGGTGCCAATATGTAAATGA
GGTGATTTTAAAAAGTGTGGGCCGTGTGGTGATTGGCTGTGGGGTTAACG
GTTAAAAGGGGCGGCGCGGCCGTGGGAAAATGACGTT

### Inverted LoxP Sequence

(SEQ ID NO: 1)
ATAACTTCGTATAATGTATGCTATACGAAGTTAT

### Inverted Sequence (Inverted LoxP Sequences Underlined; Inverted Recombinase-Flanked Packaging Sequence Bold and Italicized)

(SEQ ID NO: 38)
ATTACCCTGTTATCCCTAAATAACTTCGTATAATGTATGCTATACGAAG
TTATATACCCTAGCGATCAGCTGACACCTACGTAAAAACAGAAGACTTT
GACACGGTACGCGGAAATTCAGGTAAAAAACACGGTAATCGAAACCTCC
ACGTAATGGGTCAAAGTCTACCTGGCCCTGAACAAATACTCCACCCTGC
CATAAATACCACATTATTCAGAAAAACACTTCCTCATTCAGTTTTCGCG
CGAAAATCAGCAATTTTCACTTGCATCCGGTCAAAACTACCTCATTTCC
TGTTAAATACCGTGGGAAAACTAAGTAGTTCCGTGAGAAAAGAATAACT
TCGTATAATGTATGCTATACGAAGTTATAGCCTTTTTATGCGTAACATT
TCCCGCGACAACTTGCAAAAAAACTCCACCC

### Inverted Recombinase-Flanked Packaging Sequence (Identified Inverted Packaging Signals A1, A2, A5 and A6 Underlined)

(SEQ ID NO: 39)
ATACCCTAGCGATCAGCTGACACCTACGTAAAAACAGAAGACTTTGACA
CGGTACGCGGAAATTCAGGTAAAAAACACGGTAATCGAAACCTCCACGT
AATGGGTCAAAGTCTACCTGGCCCTGAACAAATACTCCACCCTGCCATA
AATACCACATTATTCAGAAAAACACTTCCTCATTCAGTTTTCGCGCGAA
AATCAGCAATTTTCACTTGCATCCGGTCAAAACTACCTCATTTCCTGTT
AAATACCGTGGGAAAACTAAGTAGTTCCGTGAGAAAAGA

### Exemplary Construct 8

[0382] Construct 8 (FIG. 9D) corresponds to Construct 1 (FIG. 2D) but includes a packaging sequence inversion. The inverted recombinase-flanked packing sequence is shown in the context of nucleotides 1-497 of the reference Ad35 sequence in GenBank accession number AY128640. Positions of inserted sequence elements are identified based on their correspondence with positions of the reference Ad35 genome sequence, including if present in Construct 8 in an inverted orientation. Two inserted LoxP sites—one at position 161 and the other at position 497—flank a packaging sequence of the Ad35 genome, so that Cre recombinase-mediated deletion of the flanked packaging sequence will render the genome deficient for packaging. The sequence TAGGGATAACAGGGTAAT (SEQ ID NO: 29) was inserted in place of a deletion of base pairs 481-497 to create a recognition site for the restriction enzyme I-SceI. In addition, the sequence CCGGCC (SEQ ID NO: 14) was inserted at position 143 to create a first recognition site for the restriction enzyme FseI, and the sequence GGCCGGCC (SEQ ID NO: 30) was inserted immediately downstream of the LoxP site inserted at position 497 to create a second recognition site for the restriction enzyme FseI. An inverted recombinase-flanked packing sequence was generated by inversion of a sequence comprising the recombinase-flanked packaging sequence. The inverted sequence for Construct 8 includes the sequence flanked by the two FseI sites at positions 143 and 497-which includes the two LoxP sites, the recombinase-flanked packaging sequence, and the I-SceI recognition site. The inverted LoxP sites flank the inverted recombinase-flanked packaging sequence of the Ad35 genome so that Cre recombinase-mediated deletion of the flanked sequences will render the genome deficient for packaging. In the ITR, CTATCTAT (SEQ ID NO: 12) was used in place of the canonical CATCATCA (SEQ ID NO: 13) in the reference sequence, based on the publication by Wunderlich et al., J Gen Virol. 95:1574-1584 (2014). FIG. 9D shows a region of an Ad35 helper genome that includes Construct 8. Sequence information is provided below.

### Sequence Corresponding to AY128640 Nucleotides 1-497 Engineered to Include an Inverted Recombinase-Flanked Packing Sequence (Inverted Sequence Underlined; FseI Recognition Sites Bold and Italicized)

(SEQ ID NO: 40)
CTATCTATATAATATACCTTATAGATGGAATGGTGCCAATATGTAAATG
AGGTGATTTTAAAAAGTGTGGGCCGTGTGGTGATTGGCTGTGGGGTTAA
CGGTTAAAAGGGGCGGCGCGGCCGTGGGAAAATGACGTTTTATGGCCGG
CCATAACTTCGTATAATGTATGCTATACGAAGTTATATTACCCTGTTAT
CCCTAAATACCCTAGCGATCAGCTGACACCTACGTAAAAACAGAAGACT
TTGACACGGTACGCGGAAATTCAGGTAAAAAACACGGTAATCGAAACCT
CCACGTAATGGGTCAAAGTCTACCTGGCCCTGAACAAATACTCCACCCT
GCCATAAATACCACATTATTCAGAAAAACACTTCCTCATTCAGTTTTCG
CGCGAAAATCAGCAATTTTCACTTGCATCCGGTCAAAACTACCTCATTT
CCTGTTAAATACCGTGGGAAAACTAAGTAGTTCCGTGAGAAAAGAAGCC
TTTTTATGCGTAACATTTCCCGCGACAACTATAACTTCGTATAATGTAT
GCTATACGAAGTTATTGCAAAAAAACTCCACCCGGCCGGCC

[0383] Components of the above sequence are further described below.

### ITR (CTATCTAT (SEQ ID NO: 12) Sequence Used in Place of the Canonical CATCATCA (SEQ ID NO: 13) Underlined)

(SEQ ID NO: 17)
CTATCTATATAATATACCTTATAGATGGAATGGTGCCAATATGTAAATG
AGGTGATTTTAAAAAGTGTGGGCCGTGTGGTGATTGGCTGTGGGGTTAA
CGGTTAAAAGGGGCGGCGCGGCCGTGGGAAAATGACGTT

### Inverted LoxP Sequence

(SEQ ID NO: 1)
ATAACTTCGTATAATGTATGCTATACGAAGTTAT

### Inverted Sequence (Inverted LoxP Sequences Underlined; Inverted Recombinase-Flanked Packaging Sequence Bold and Italicized)

(SEQ ID NO: 41)
ATAACTTCGTATAATGTATGCTATACGAAGTTATATTACCCTGTTATCC
CTAAATACCCTAGCGATCAGCTGACACCTACGTAAAAACAGAAGACTTT
GACACGGTACGCGGAAATTCAGGTAAAAAACACGGTAATCGAAACCTCC
ACGTAATGGGTCAAAGTCTACCTGGCCCTGAACAAATACTCCACCCTGC
CATAAATACCACATTATTCAGAAAAACACTTCCTCATTCAGTTTTCGCG
CGAAAATCAGCAATTTTCACTTGCATCCGGTCAAAACTACCTCATTTCC
TGTTAAATACCGTGGGAAAACTAAGTAGTTCCGTGAGAAAAGAAGCCTT
TTTATGCGTAACATTTCCCGCGACAACTATAACTTCGTATAATGTATGC
TATACGAAGTTATTGCAAAAAAACTCCACCC

### Inverted Recombinase-Flanked Packaging Sequence (Identified Inverted Packaging Signals A1, A2, A5 and A6 Underlined)

(SEQ ID NO: 42)
ATTACCCTGTTATCCCTAAATACCCTAGCGATCAGCTGACACCTACGTA
AAAACAGAAGACTTTGACACGGTACGCGGAAATTCAGGTAAAAAACACG
GTAATCGAAACCTCCACGTAATGGGTCAAAGTCTACCTGGCCCTGAACA
AATACTCCACCCTGCCATAAATACCACATTATTCAGAAAAACACTTCCT
CATTCAGTTTTCGCGCGAAAATCAGCAATTTTCACTTGCATCCGGTCAA
AACTACCTCATTTCCTGTTAAATACCGTGGGAAAACTAAGTAGTTCCGT
GAGAAAAGAAGCCTTTTTATGCGTAACATTTCCCGCGACAACT

### Example 6: Analysis of Ad35 Helper Genome Propagation and Stability

[0384] The present Example demonstrates successful use of Ad35 helper genomes as disclosed herein that include an inverted packaging sequence. The present Example further demonstrates that Ad35 helper genomes including inverted, recombinase-flanked packaging sequences according to the present disclosure are stable and can be propagated without detectable genome rearrangement.

[0385] Broadly, a helper genome can be present in a plasmid or in a viral vector. Plasmid forms can be used to transfect target cells for production of helper vectors (which helper vectors include the Ad35 helper genome) or for production of donor vectors (which donor vectors do not include the Ad35 helper genome). In the present Example, two plasmids encoding E1-deleted Ad35 helper genomes (designated pEN0056 and pEN0057), were each transfected into HEK293 cells and propagated to determine whether viable helper viruses could be rescued. Each of pEN0056 and pEN0057 included a construct according to Constructs 7 and 8 in Example 5, respectively.

[0386] Rescued E1-deleted adenoviruses were purified using standard methods (see, e.g., Su et al. doi:10.1101/pdb.prot095547 Cold Spring Harb Protoc 2019) and viral genomes were isolated from purified helper vectors. Isolated Ad35 helper genomes were digested with XmnI alone, and starting plasmids were digested with XmnI and SwaI (which excises the plasmid backbone sequence) for comparison. Digestion products were analyzed by gel electrophoresis (FIG. 10).

[0387] To determine whether the Ad35 helper genomes were stable during propagation the restriction patterns obtained by digesting isolated adenoviral genomic DNA were compared to the restriction patterns obtained by digesting starting plasmids with the restriction enzymes XmnI and SwaI. Analysis of the restriction patterns on a gel showed the expected banding pattern and expected band sizes (FIG. 10), demonstrating that that Ad35 helper genomes including inverted recombinase-flanked packaging sequences as disclosed herein are genetically stable and can be propagated without detectable genome rearrangement in large-scale preparations.

### Example 7: Analysis of Recombinase-Mediated Excision of Inverted Recombinase-Flanked Packaging Sequences in Ad35 Helper Genomes

[0388] The present Example demonstrates the recombinase-mediated deletion of inverted recombinase-flanked packaging sequences in Ad35 helper genomes. Plasmids including Ad35 helper genomes (pEN0056 and pEN0057) were linearized by digestion with SwaI (which excised the plasmid backbone sequence) and transfected into each of two cell types: HEK293 cells that do not express Cre recombinase, and 116 cells modified from HEK293 cells to express Cre recombinase. Thus, excision of loxP flanked sequences is expected in the 116 cells but not the HEK293 cells. DNA was isolated from transfected cells and digested with the restriction enzyme ApaI. Digestion of the Ad35 helper genome with restriction enzyme ApaI is expected to produce a 2013 bp fragment. A smaller DNA fragment is expected if the Ad35 helper genome has undergone recombination to mediate deletion of the inverted recombinase-flanked packaging sequence. Restriction results were analyzed by gel electrophoresis (FIG. 11). The expected band sizes were observed for DNA isolated from HEK293 cells transfected with the Ad35 helper genomes (FIG. 11—lanes 2 and 4) and for DNA isolated from 116 cells transfected with the Ad35 helper genomes (FIG. 11—lanes 3 and 5). Data therefore show successful Cre-mediated excision of flanked packaging sequences from all helper genomes in the presence of recombinase.

### Example 8: Analysis of Helper-Dependent Adenovirus (HDAd) Production Using Ad35 Helper Vectors with Genomes Including Inverted Recombinase-Flanked Packaging Sequences

[0389] The present Example demonstrates the production of helper-dependent adenovirus (HDAd) using Ad35 helper vectors with genomes including inverted recombinase-flanked packaging sequences. Ad35 helper vectors were purified from HEK293 cells transfected with plasmids including Ad35 helper genomes with inverted recombinase-flanked packaging sequences (pEN0056 and pEN0057). Helper-dependent adenoviral vectors were produced according to standard procedures (see Palmer and Ng, Methods Mol Biol. 2008; 433:33-53) in 116 cells using the purified Ad35 helper vectors and transfecting plasmid 5475, a plasmid that encodes a helper-dependent genome that includes terminal sequences derived from Ad35 and includes a cassette for expression of beta-galactosidase (FIG. 12). HDAd viral particles produced using Ad35 helper vectors from pEN0056 and pEN0057 were isolated and subsequently used to achieve production of secondary HDAd preparations by co-infection of 116 cells with the HDAd viral particles from plasmid 5475 and Ad35 helper viral particles from pEN0056 and pEN0057 (respectively).

[0390] Helper-dependent adenovirus (HDAd) preparations were purified by using two consecutive cesium chloride continuous gradients (FIG. 13A-B). Purified HDAd preparations were characterized using several approaches. The physical titer or yield of the purified virus preparations was determined by spectrophotometry and can be expressed as the total number of purified viral particles (vp) or the number of viral particles per volume (vp/ml). The infectivity of the purified HDAd preparations was determined by using the purified helper-dependent viruses to infect cultured HEK293 cells and staining the cells to determine their expression of beta-galactosidase (as described in Parks et al., PNAS. 1996: 93(24):13565-13570). Infected cells were expected to express beta-galactosidase. Infectivity was represented in terms of blue-forming units (BFU), which is the number of cells that showing blue staining indicating positive expression of beta-galactosidase encoded by the cassette in HDAd genome. Infectivity can be further represented as the BFU per volume of purified virus (BFU/ml) and/or the ratio between the total number of viral particles and the BFU (vp:BFU).

[0391] Further characterization of the purified HDAd preparations was performed using DNA isolated from the purified HDAd preparations. Isolated DNA was digested using restriction enzyme (SacII) and the restriction pattern was compared to the restriction pattern obtained by digestion using restriction enzymes (SacII and PmeI) of the starting HDAd plasmid and the restriction pattern obtained by digestion using restriction enzymes (SacII and SwaI) of the starting Ad35 helper plasmids. Analysis of the restriction patterns on a gel showed the expected banding pattern and expected band sizes (FIG. 14), indicating successful HDAd production. Vectors, genomes, and conditional packaging sequences analyzed in FIG. 14 are advantageous and useful for various methods and compositions provided herein. Additionally, the Ad35 helper contamination fraction in the purified preparation was determined using quantitative PCR of DNA isolated from the purified HDAd preparation.

[0392] Table 38 shows the results from experiments to characterize the purified HDAd preparations. Table 39 shows results from secondary preparations, including estimated helper fraction (%).

TABLE 38
Characterization of Purified HDAd Preparations

| Helper | | Yield | Yield | Infectivity | Infectivity | Helper fraction |
|---|---|---|---|---|---|---|
| plasmid | Construct | (vp) | (vp/ml) | (BFU/ml) | (vp:BFU) | (%) |
| pEN0056 | Construct 7 | 3.23e12 | 1.126e12 | 5.69e10 | 19.8:1 | 1.44 |
| pEN0057 | Construct 8 | 2.45e12 | 7.806e11 | 2.44e10 | 32:1 | 1.67 |

TABLE 39
Characterization of Secondary HDAd Preparations

| | | | | Helper |
|---|---|---|---|---|
| Helper | | Yield | Infectivity | fraction |
| plasmid | Construct | (vp) | (vp:BFU) | (%) |
| pEN0057 | Construct 8 | 5e12 | 17.6:1 | 0.95 |

[0393] To further demonstrate production of helper-dependent adenovirus (HDAd) using Ad35 helper vectors with genomes including inverted, recombinase-flanked packaging sequences, HDAd vectors were produced in 116 cells using a purified Ad35 helper vector (from pEN0057) and transfecting one of two exemplary plasmids (plasmid 1 and plasmid 2). Plasmid 1 and plasmid 2 encode exemplary helper-dependent genomes that each include terminal sequences derived from Ad35 and includes an exemplary transgene payload, each of plasmids 1 and 2 including a different exemplary transgene payload. HDAd preparations were purified by using two consecutive cesium chloride continuous gradients (FIG. 15A-B). Purified HDAd preparations were characterized as described above. DNA isolated from the purified HDAd preparations was digested using restriction enzyme (EcoRV) and the restriction pattern was compared to the restriction pattern obtained by digestion using restriction enzymes (EcoRV and PmeI) of the starting HDAd plasmids and the restriction pattern obtained by digestion using restriction enzymes (EcoRV and SwaI) of the starting Ad35 helper plasmid. Analysis of the restriction patterns on a gel showed the expected banding pattern and expected band sizes (FIG. 16), indicating successful HDAd production.

[0394] Table 40 shows the results from experiments to characterize the purified HDAd preparations.

TABLE 40
Characterization of Purified HDAd Preparations

| | | | | Helper |
|---|---|---|---|---|
| Helper | | HDAd | Yield | fraction |
| plasmid | Construct | plasmid | (vp) | (%) |
| pEN0057 | Construct 8 | Plasmid 1 | 2.08e12 | 0.75 |
| pEN0057 | Construct 8 | Plasmid 2 | 4.27e12 | 0.75 |
| pEN0057 | Construct 8 | Plasmid 2 | 3.74e12 | 0.81 |

### Example 9: Design of Helper Genomes

[0395] The present Example includes the identification of positions within Ad3, Ad7, Ad11, Ad14, Ad16, Ad21, Ad34, and Ad50 genomes, and particularly within the Ad3, Ad7, Ad11, Ad14, Ad16, Ad21, Ad34, and Ad50 packaging sequences, at which recombinase sites can be positioned for efficient switching between packaging competence and packaging deficiency. A person of skill in the art will appreciate that data presented in the preceding examples for Ad35 can be extrapolated to other species B serotypes including Ad3, Ad7, Ad11, Ad14, Ad16, Ad21, Ad34 and Ad50, based at least in part on the recognized functional and sequence similarity of serotypes within the species. Insertion or positioning of the recombinase sites into the packaging sequence will not abrogate adenoviral genome packaging. However, excision of the recombinase-flanked sequences will reduce and/or eliminates packaging of the genome.

[0396] The present Example includes alignment of adenoviral packaging sequences to identify putative packaging signals in the Ad3, Ad7, Ad11, Ad14, Ad16, Ad21, Ad34, and Ad50 genomes, as shown in FIG. 1B. The present Example further includes selection of particular locations for placement of 5′ (left) and 3′ (right) recombinase sites, also shown in FIG. 1B and Table 21. Selected left recombinase sites include positions corresponding to an L1, L2, L3, or L4 site of a reference Ad3, Ad7, Ad11, Ad14, Ad16, Ad21, Ad34, or Ad50 genome as disclosed in Table 21. Selected right recombinase sites include positions corresponding to an R1, R2, or R3 site of a reference Ad3, Ad7, Ad11, Ad14, Ad16, Ad21, Ad34, or Ad50 genome as disclosed in Table 21. The present Example further includes particular pairings of left and right recombinase site positions: position L1 with position R3, position L2 with position R1, position L3 with position R2, and position L4 with position R1. These pairing are shown as exemplary Constructs 9-40 in Table 41.

TABLE 41
Exemplary constructs including recombinase-flanked packaging sequences

| | | Left | Right | |
|---|---|---|---|---|
| Exemplary | | Recombinase | Recombinase | |
| Construct | Serotype | Position | Position | Reference Sequence |
| 9 | Ad3 | L1 (163) | R3 (500) | NCBI accession no. NC_011203 |
| 10 | Ad3 | L2 (173) | R1 (405) | NCBI accession no. NC_011203 |
| 11 | Ad3 | L3 (197) | R2 (482) | NCBI accession no. NC_011203 |
| 12 | Ad3 | L4 (227) | R1 (405) | NCBI accession no. NC_011203 |
| 13 | Ad7 | L1 (163) | R3 (500) | GenBank accession no. AY601634 |
| 14 | Ad7 | L2 (173) | R1 (405) | GenBank accession no. AY601634 |
| 15 | Ad7 | L3 (197) | R2 (482) | GenBank accession no. AY601634 |
| 16 | Ad7 | L4 (227) | R1 (405) | GenBank accession no. AY601634 |
| 17 | Ad11 | L1 (161) | R3 (498) | NCBI accession no. NC_011202 |
| 18 | Ad11 | L2 (171) | R1 (401) | NCBI accession no. NC_011202 |
| 19 | Ad11 | L3 (195) | R2 (478) | NCBI accession no. NC_011202 |
| 20 | Ad11 | L4 (223) | R1 (401) | NCBI accession no. NC_011202 |
| 21 | Ad14 | L1 (161) | R3 (498) | GenBank accession no. AY803294 |
| 22 | Ad14 | L2 (171) | R1 (419) | GenBank accession no. AY803294 |
| 23 | Ad14 | L3 (195) | R2 (496) | GenBank accession no. AY803294 |
| 24 | Ad14 | L4 (223) | R1 (419) | GenBank accession no. AY803294 |
| 25 | Ad16 | L1 (161) | R3 (498) | GenBank accession no. AY601636 |
| 26 | Ad16 | L2 (171) | R1 (403) | GenBank accession no. AY601636 |
| 27 | Ad16 | L3 (195) | R2 (480) | GenBank accession no. AY601636 |
| 28 | Ad16 | L4 (225) | R1 (403) | GenBank accession no. AY601636 |
| 29 | Ad21 | L1 (161) | R3 (498) | GenBank accession no. AY601633 |
| 30 | Ad21 | L2 (171) | R1 (403) | GenBank accession no. AY601633 |
| 31 | Ad21 | L3 (195) | R2 (480) | GenBank accession no. AY601633 |
| 32 | Ad21 | L4 (225) | R1 (403) | GenBank accession no. AY601633 |
| 33 | Ad34 | L1 (161) | R3 (498) | GenBank accession no. AY737797 |
| 34 | Ad34 | L2 (171) | R1 (402) | GenBank accession no. AY737797 |
| 35 | Ad34 | L3 (195) | R2 (479) | GenBank accession no. AY737797 |
| 36 | Ad34 | L4 (224) | R1 (402) | GenBank accession no. AY737797 |
| 37 | Ad50 | L1 (160) | R3 (497) | GenBank accession no. AY737798 |
| 38 | Ad50 | L2 (170) | R1 (402) | GenBank accession no. AY737798 |
| 39 | Ad50 | L3 (194) | R2 (479) | GenBank accession no. AY737798 |
| 40 | Ad50 | L4 (224) | R1 (402) | GenBank accession no. AY737798 |

[0397] Constructs 9-40 are presented in Table 41 and include recombinase sites positions to generate a conditionally defective packaging sequence of an adenoviral genome. For each construct, positions of inserted LoxP sites are indicated relative to a respective adenoviral genome sequence. The LoxP sites flank an adenoviral packaging sequence so that Cre recombinase-mediated deletion of the flanked sequences will render the genome deficient for packaging. The inserted LoxP sequence corresponds to ATAACTTCGTATAGCATACATTATACGAAGTTAT (SEQ ID NO: 18). Optionally, in the 5′ inverted terminal repeat (ITR) of the indicated genome, CTATCTAT (SEQ ID NO: 12) can be used in place of the canonical sequence present at positions 1-8 in the indicated reference sequence, based on the publication by Wunderlich et al., J Gen Virol. 95:1574-1584 (2014).

### Example 10: Design of Helper Genomes Including Inverted Packaging Sequences

[0398] The present Example demonstrates the design of Ad3, Ad7, Ad11, Ad14, Ad16, Ad21, Ad34, and Ad50 helper genomes that include inverted packaging sequences. The present Example is based at least in part on the recognition that use of an inverted packaging sequence in an Ad3, Ad7, Ad11, Ad14, Ad16, Ad21, Ad34, or Ad50 helper vector can reduce and/or eliminate recombinase site-excising homologous recombination (compare FIG. 8A and FIG. 8B). Inversion of sequences comprising a conditionally defective packaging sequence-thereby generating an inverted recombinase-flanked packaging sequences-will reduce and/or eliminate recombinase site-excising homologous recombination, as shown in FIG. 8B. Sequence elements included within an inverted sequence are herein referred to as inverted sequence elements (e.g., a recombinase-flanked packaging sequence included within an inverted sequence is referred to as an inverted recombinase-flanked packaging sequence). A person of skill in the art would appreciate from the present disclosure that the orientation of the packaging sequence is not critical to its function (see, e.g., Palmer and Ng, Mol Ther. 2003; 8:8460852) and would further appreciate from the present disclosure that an inverted conditionally defective packaging sequence as disclosed herein is packaging competent. An inverted recombinase site flanked packaging sequence can further be excised by recombination upon contact with a corresponding recombinase and prevent packaging of a helper genome.

[0399] The present Example particularly includes Ad3, Ad7, Ad11, Ad14, Ad16, Ad21, Ad34, and Ad50 helper genomes including inverted packaging sequences, as shown as exemplary Constructs 41-72 in Table 42. Constructs 41-72 correspond to Constructs 9-41 but includes a packaging sequence inversion. Constructs 41-72 contain loxP sites inserted at the positions indicated for Constructs 9-40 as indicated in Table 41. Positions of the inserted loxP sequences are identified based on their correspondence with positions in the indicated reference genome sequence, regardless of whether the position is present in an inverted orientation. The inserted loxP sites in each of Constructs 41-72 flank a packaging sequence of the corresponding genome, so that Cre recombinase-mediated deletion of the flanked packaging sequence will render the genome deficient for packaging. An inverted recombinase-flanked packaging sequence is generated by inversion of a sequence comprising the recombinase-flanked packaging sequence. The inverted sequence for each of Constructs 41-72 includes a sequence have a first end point and a second endpoint corresponding to a left inversion position (Left Inversion Point) and right inversion position (Right Inversion Point) of a corresponding reference genome, as set forth in Table 28. The inverted sequences include the two loxP sites and the recombinase-flanked packaging sequence. The inverted LoxP sites flank the inverted recombinase-flanked packaging sequence of the Ad3, Ad7, Ad11, Ad14, Ad16, Ad21, Ad34, or Ad50 genome so that Cre recombinase-mediated deletion of the flanked sequences will render the genome deficient for packaging. Optionally, in the 5′ inverted terminal repeat (ITR) of the indicated genome, CTATCTAT (SEQ ID NO: 12) can be used in place of the canonical sequence present at positions 1-8 in the indicated reference sequence, based on the publication by Wunderlich et al., J Gen Virol. 95:1574-1584 (2014).

TABLE 42
Exemplary constructs including inverted recombinase-flanked packaging sequences

| | | | Left | Right | |
|---|---|---|---|---|---|
| Exemplary | | Related | Inversion | Inversion | |
| Construct | Serotype | Construct | Position | Position | Reference Sequence |
| 41 | Ad3 | 9 | 137 | 500 | NCBI accession no. NC_011203 |
| 42 | Ad3 | 10 | 137 | 500 | NCBI accession no. NC_011203 |
| 43 | Ad3 | 11 | 137 | 500 | NCBI accession no. NC_011203 |
| 44 | Ad3 | 12 | 137 | 500 | NCBI accession no. NC_011203 |
| 45 | Ad7 | 13 | 137 | 500 | GenBank accession no. AY601634 |
| 46 | Ad7 | 14 | 137 | 500 | GenBank accession no. AY601634 |
| 47 | Ad7 | 15 | 137 | 500 | GenBank accession no. AY601634 |
| 48 | Ad7 | 16 | 137 | 500 | GenBank accession no. AY601634 |
| 49 | Ad11 | 17 | 138 | 498 | NCBI accession no. NC_011202 |
| 50 | Ad11 | 18 | 138 | 498 | NCBI accession no. NC_011202 |
| 51 | Ad11 | 19 | 138 | 498 | NCBI accession no. NC_011202 |
| 52 | Ad11 | 20 | 138 | 498 | NCBI accession no. NC_011202 |
| 53 | Ad14 | 21 | 138 | 498 | GenBank accession no. AY803294 |
| 54 | Ad14 | 22 | 138 | 498 | GenBank accession no. AY803294 |
| 55 | Ad14 | 23 | 138 | 498 | GenBank accession no. AY803294 |
| 56 | Ad14 | 24 | 138 | 498 | GenBank accession no. AY803294 |
| 57 | Ad16 | 25 | 115 | 498 | GenBank accession no. AY601636 |
| 58 | Ad16 | 26 | 115 | 498 | GenBank accession no. AY601636 |
| 59 | Ad16 | 27 | 115 | 498 | GenBank accession no. AY601636 |
| 60 | Ad16 | 28 | 115 | 498 | GenBank accession no. AY601636 |
| 61 | Ad21 | 29 | 115 | 498 | GenBank accession no. AY601633 |
| 62 | Ad21 | 30 | 115 | 498 | GenBank accession no. AY601633 |
| 63 | Ad21 | 31 | 115 | 498 | GenBank accession no. AY601633 |
| 64 | Ad21 | 32 | 115 | 498 | GenBank accession no. AY601633 |
| 65 | Ad34 | 33 | 138 | 498 | GenBank accession no. AY737797 |
| 66 | Ad34 | 34 | 138 | 498 | GenBank accession no. AY737797 |
| 67 | Ad34 | 35 | 138 | 498 | GenBank accession no. AY737797 |
| 68 | Ad34 | 36 | 138 | 498 | GenBank accession no. AY737797 |
| 69 | Ad50 | 37 | 115 | 497 | GenBank accession no. AY737798 |
| 70 | Ad50 | 38 | 115 | 497 | GenBank accession no. AY737798 |
| 71 | Ad50 | 39 | 115 | 497 | GenBank accession no. AY737798 |
| 72 | Ad50 | 40 | 115 | 497 | GenBank accession no. AY737798 |

### Example 11: Analysis of Helper Genome Propagation and Stability

[0400] The present Example includes demonstration that helper genomes including recombinase-flanked packaging sequences and helper genomes including an inverted packaging sequence (e.g., an inverted, recombinase-flanked packaging sequence) according to the present disclosure are stable and can be propagated without detectable genome rearrangement.

[0401] Broadly, a helper genome can be present in a plasmid or in a viral vector. Plasmid forms can be used to transfect target cells for production of helper vectors (which helper vectors include the helper genome) or for production of donor vectors (which donor vectors do not include the helper genome). In the present Example, plasmids encoding exemplary E1-deleted helper genomes including a construct according to Examples 9 and 10 are each transfected into HEK293 cells and propagated to determine whether viable helper viruses can be rescued.

[0402] Rescued E1-deleted adenoviruses are purified using standard methods (see, e.g., Su et al., Cold Spring Harb Protoc. (2019), doi:10.1101/pdb.prot095547) and viral genomes are isolated from purified helper vector. Isolated helper genomes and starting plasmids are digested with restriction enzymes. To determine whether the helper genomes are stable during propagation, restriction patterns obtained by digesting isolated adenoviral genomic DNA are compared to the restriction patterns obtained by digesting starting plasmids. Analysis of the restriction patterns by gel electrophoresis will demonstrate that helper genomes including recombinase-flanked packaging sequences and helper genomes including inverted recombinase-flanked packaging sequences are genetically stable and can be propagated without detectable genome rearrangement in large-scale preparations.

### Example 12: Analysis of Recombinase-Mediated Excision of Recombinase-Flanked Packaging Sequences in Helper Genomes

[0403] The present Example includes demonstration of recombinase-mediated deletion of recombinase-flanked packaging sequences and inverted, recombinase-flanked packing sequences in helper genomes. Plasmids encoding exemplary E1-deleted helper genomes including a construct according to Examples 9 and 10 are linearized by restriction enzyme digestion (which excises the plasmid backbone sequence) and transfected into each of two cell types: HEK293 cells that do not express Cre recombinase, and 116 cells modified from HEK293 cells to express Cre recombinase. Accordingly, excision of loxP-flanked sequences is expected in the 116 cells but not the HEK293 cells. DNA is isolated from transfected cells and subject to restriction enzyme digestion. Digestion of the helper genome is expected to produce different restriction patterns depending on whether the helper genome has undergone recombination to mediate deletion of the recombinase-flanked packaging sequence or the inverted, recombinase-flanked packing sequence. A person of skill in the art would appreciate that the expected restriction patterns can be readily determined based on the sequence of the helper genome and the particular restriction enzyme(s) being used for digestion. Restriction results are analyzed by gel electrophoresis. Observation of the expected band sizes will show successful Cre-mediated excision of flanked packaging sequences from the helper genomes in the presence of recombinase.

### Example 13: Analysis of Helper-Dependent Adenovirus (HDAd) Production Using Helper Vectors with Genomes Including Recombinase-Flanked Packaging Sequences

[0404] The present Example includes demonstration of the production of helper-dependent adenovirus (HDAd) using helper vectors with genomes including recombinase-flanked packaging sequences or inverted recombinase-flanked packaging sequences. Helper vectors are purified from HEK293 cells transfected with plasmids exemplary E1-deleted helper genomes including a construct according to Examples 9 and 10. Helper-dependent adenoviral vectors are then produced according to standard procedures (see, Palmer and Ng, Methods Mol Biol. 433:33-53 (2008)) in 116 cells using the purified helper vectors and transfecting a plasmid that encodes a helper-dependent genome that includes (i) terminal sequences derived from the same adenoviral serotype as the helper vector and (ii) a cassette for expression of a reporter gene (e.g., beta-galactosidase). HDAd viral particles produced using helper vectors are isolated and subsequently used to produce secondary HDAd preparations by co-infection of 116 cells with the HDAd viral particles and helper viral particles.

[0405] HDAd preparations are purified (e.g., by using two consecutive cesium chloride continuous gradients). Purified HDAd preparations are characterized using several approaches. The physical titer or yield of the purified virus preparations is determined by spectrophotometry and can be expressed as the total number of purified viral particles (vp) or the number of viral particles per volume (vp/ml). The infectivity of the purified HDAd preparations is determined by using the purified helper-dependent viruses to infect cultured HEK293 cells and analyzing the cells to determine their expression of the reporter gene (e.g., by staining the cells to determine their expression of beta-galactosidase, as described in Parks et al., PNAS. 93(24):13565-13570 (1996)). Infected cells are expected to express the reporter gene. Infectivity can be expressed as the number of cells showing expression of the reporter gene (e.g., in terms of blue-forming units (BFU) for beta-galactosidase as a reporter gene). Infectivity can be further represented as the number of cells showing expression of the reporter gene per volume of purified virus and/or the ratio between the total number of viral particles and the number of cells showing expression of the reporter gene.

[0406] Further characterization of the purified HDAd preparations was performed using DNA isolated from the purified HDAd preparations. Further characterization of the purified HDAd preparations is performed using DNA isolated from the purified HDAd preparations. Isolated DNA is digested using restriction enzyme(s) and the restriction pattern is compared to (i) the restriction pattern obtained by digestion using restriction enzyme(s) of the starting HDAd plasmid and (ii) the restriction pattern obtained by digestion using restriction enzyme(s) of the starting helper plasmids. Analysis of the restriction patterns on a gel will show the expected banding pattern and expected band, indicating successful HDAd production. Additionally, the helper contamination faction in the purified preparation is determined using quantitative PCR of DNA isolated from the purified HDAd preparation.

### Accession Sequences

[0407] Provided herein is a listing of nucleic acid sequences and amino acid sequences corresponding to publicly available sequence accession numbers, certain of which sequences and/or sequence accession numbers are included and/or utilized, in whole and/or in part, in the present disclosure, and/or certain of which sequences and/or sequence accession numbers are included herein as references. Sequences associated with accession numbers are available in publicly accessible databases, as is known to those of skill in the art, and such sequences are provided herein solely for easy for reference.

### OTHER EMBODIMENTS

[0408] While we have described a number of embodiments, it is apparent that our disclosure and examples also provide other embodiments that utilize or are encompassed by the compositions and methods described herein. Therefore, it will be appreciated that the scope of disclosure is to be defined by that which may be understood from the disclosure rather than by the specific embodiments that have been represented by way of example. Limitations described with respect to one aspect of the disclosure, in certain embodiments, be practiced with respect to other aspects of the disclosure. For example, limitations of claims that depend directly or indirectly from a certain independent claim presented herein serve as support for those limitations being presented in additional dependent claims of one or more other independent claims.

[0409] All references cited herein are hereby incorporated by reference.

What is claimed is:

1. A recombinant adenoviral helper genome comprising:
a 5′ inverted terminal repeat (ITR);
a 3′ ITR; and
a packaging sequence;
wherein the 5′ ITR, the 3′ ITR, and the packaging sequence are each derived from a species B adenovirus of a serotype selected from Ad3, Ad7, Ad11, Ad14, Ad16, Ad21, Ad34, or Ad50;
wherein the packaging sequence is flanked by or comprises recombinase direct repeats comprising a first recombinase direct repeat and a second recombinase direct repeat;
wherein the position of the first recombinase direct repeat corresponds to a position that is within 10 nucleotides of an L1, L2, L3, or L4 site of a reference sequence for the serotype of the packaging sequence, as set forth in Table 21; and
wherein the position of the second recombinase direct repeat corresponds to a position that is within 10 nucleotides of an R1, R2, or R3 site of a reference sequence for the serotype of the packaging sequence, as set forth in Table 21.

2. The helper genome of claim 1, wherein the position of the first recombinase direct repeat corresponds to a position that is within 10 nucleotides of an L1 site of a reference sequence for the serotype of the packaging sequence, as set forth in Table 21; and wherein the position of the second recombinase direct repeat corresponds to a position that is within 10 nucleotides of an R3 site of a reference sequence for the serotype of the packaging sequence, as set forth in Table 21.

3. The helper genome of claim 1, wherein the position of the first recombinase direct repeat corresponds to a position that is within 10 nucleotides of an L2 site of a reference sequence for the serotype of the packaging sequence, as set forth in Table 21; and wherein the position of the second recombinase direct repeat corresponds to a position that is within 10 nucleotides of an R1 site of a reference sequence for the serotype of the packaging sequence, as set forth in Table 21.

4. The helper genome of claim 1, wherein the position of the first recombinase direct repeat corresponds to a position that is within 10 nucleotides of an L3 site of a reference sequence for the serotype of the packaging sequence, as set forth in Table 21; and wherein the position of the second recombinase direct repeat corresponds to a position that is within 10 nucleotides of an R2 site of a reference sequence for the serotype of the packaging sequence, as set forth in Table 21.

5. The helper genome of claim 1, wherein the position of the first recombinase direct repeat corresponds to a position that is within 10 nucleotides of an L4 site of a reference sequence for the serotype of the packaging sequence, as set forth in Table 21; and wherein the position of the second recombinase direct repeat corresponds to a position that is within 10 nucleotides of an R1 site of a reference sequence for the serotype of the packaging sequence, as set forth in Table 21.

6. The helper genome of claim 1, wherein the position of the first recombinase direct repeat corresponds to a position at an L1, L2, L3, or L4 site of a reference sequence for the serotype of the packaging sequence, as set forth in Table 21; and wherein the position of the second recombinase direct repeat corresponds to a position that is at an R1, R2, or R3 site of a reference sequence for the serotype of the packaging sequence, as set forth in Table 21.

7. The helper genome of claim 1, wherein the position of the first recombinase direct repeat corresponds to a position at an L1 site of a reference sequence for the serotype of the packaging sequence, as set forth in Table 21; and wherein the position of the second recombinase direct repeat corresponds to a position that is at an R3 site of a reference sequence for the serotype of the packaging sequence, as set forth in Table 21.

8. The helper genome of claim 1, wherein the position of the first recombinase direct repeat corresponds to a position at an L2 site of a reference sequence for the serotype of the packaging sequence, as set forth in Table 21; and wherein the position of the second recombinase direct repeat corresponds to a position that is at an R1 site of a reference sequence for the serotype of the packaging sequence, as set forth in Table 21.

9. The helper genome of claim 1, wherein the position of the first recombinase direct repeat corresponds to a position at an L3 site of a reference sequence for the serotype of the packaging sequence, as set forth in Table 21; and wherein the position of the second recombinase direct repeat corresponds to a position that is at an R2 site of a reference sequence for the serotype of the packaging sequence, as set forth in Table 21.

10. The helper genome of claim 1, wherein the position of the first recombinase direct repeat corresponds to a position at an L4 site of a reference sequence for the serotype of the packaging sequence, as set forth in Table 21; and wherein the position of the second recombinase direct repeat corresponds to a position that is at an R1 site of a reference sequence for the serotype of the packaging sequence, as set forth in Table 21.

11. The helper genome of claim 1, wherein the position of the first recombinase direct repeat corresponds to a position at an L1, L2, L3, or L4 site of a reference sequence for the serotype of the packaging sequence, as set forth in any one of Tables 22-27; and wherein the position of the second recombinase direct repeat corresponds to a position that is at an R1, R2, or R3 site of a reference sequence for the serotype of the packaging sequence, as set forth in any one of Tables 22-27.

12. The helper genome of claim 1, wherein the position of the first recombinase direct repeat corresponds to a position at an L1 site of a reference sequence for the serotype of the packaging sequence, as set forth in any one of Tables 22-27; and wherein the position of the second recombinase direct repeat corresponds to a position that is at an R3 site of a reference sequence for the serotype of the packaging sequence, as set forth in any one of Tables 22-27.

13. The helper genome of claim 1, wherein the position of the first recombinase direct repeat corresponds to a position at an L2 site of a reference sequence for the serotype of the packaging sequence, as set forth in any one of Tables 22-27; and wherein the position of the second recombinase direct repeat corresponds to a position that is at an R1 site of a reference sequence for the serotype of the packaging sequence, as set forth in any one of Tables 22-27.

14. The helper genome of claim 1, wherein the position of the first recombinase direct repeat corresponds to a position at an L3 site of a reference sequence for the serotype of the packaging sequence, as set forth in any one of Tables 22-27; and wherein the position of the second recombinase direct repeat corresponds to a position that is at an R2 site of a reference sequence for the serotype of the packaging sequence, as set forth in any one of Tables 22-27.

15. The helper genome of claim 1, wherein the position of the first recombinase direct repeat corresponds to a position at an L4 site of a reference sequence for the serotype of the packaging sequence, as set forth in any one of Tables 22-27; and wherein the position of the second recombinase direct repeat corresponds to a position that is at an R1 site of a reference sequence for the serotype of the packaging sequence, as set forth in any one of Tables 22-27.

16. The helper genome of any one of claims 1-15, wherein the 5′ ITR and the 3′ ITR are derived from the same serotype.

17. The helper genome of any one of claims 1-16, wherein the 5′ ITR, the 3′ ITR, and the packaging sequence are derived from the same serotype.

18. The helper genome of any one of claims 1-17, wherein the recombinase direct repeats that flank the packaging sequence are FRT, loxP, rox, vox, AttB, or AttP sites.

19. The helper genome of any one of claims 1-18, wherein the recombinase direct repeats that flank the packaging sequence are loxP sites.

20. A recombinant adenoviral helper vector comprising the helper genome of any one of claims 1-19.

21. A recombinant adenoviral vector production system comprising:
(i) the helper genome of any one of claims 1-19 or the helper vector of claim 20, and
(ii) a helper-dependent adenoviral (HDAd) donor genome, the HDAd donor genome comprising:
a 5′ inverted terminal repeat (ITR);
a 3′ ITR;
a packaging sequence; and
a nucleic acid sequence encoding at least one heterologous expression product;
wherein the 5′ ITR, the 3′ ITR, and the packaging sequence of the HDAd donor genome are each derived from a species B adenovirus of a serotype selected from Ad3, Ad7, Ad11, Ad14, Ad16, Ad21, Ad34, or Ad50.

22. A method of producing a recombinant helper-dependent adenoviral (HDAd) donor vector, the method comprising isolating the recombinant HDAd donor vector from a culture of cells, wherein the cells comprise:
a recombinant helper genome of any one of claims 1-19 or a recombinant adenoviral helper vector of claim 20; and
a recombinant HDAd donor genome comprising:
a 5′ inverted terminal repeat (ITR);
a 3′ ITR;
a packaging sequence; and
a nucleic acid sequence encoding at least one heterologous expression product;
wherein the 5′ ITR, the 3′ ITR, and the packaging sequence of the HDAd donor genome are each derived from a species B adenovirus of a serotype selected from Ad3, Ad7, Ad11, Ad14, Ad16, Ad21, Ad34, or Ad50.

23. The system or method of claim 21 or claim 22, wherein the 5′ ITR and the 3′ ITR of the HDAd donor genome are derived from the same serotype.

24. The system or method of any one of claims 21-23, wherein the 5′ ITR, the 3′ ITR, and the packaging sequence of the HDAd donor genome are derived from the same serotype.

25. The helper genome, helper vector, system, or method of any one of claims 1-24, wherein the helper genome comprises a nucleic acid sequence that encodes an Ad35 fiber knob.

26. The genome, vector, system, or method of claim 25, wherein the Ad35 fiber knob comprises a mutation that increases affinity with CD46.

27. The helper genome, helper vector, system, or method of claim 25 or claim 26, wherein the Ad35 fiber knob comprises one or more mutations:
selected from Ile192Val, Asp207Gly (or Glu207Gly), Asn217Asp, Thr226Ala, Thr245Ala, Thr254Pro, Ile256Leu, Ile256Val, Arg259Cys, and Arg279His; or
comprising each of mutations Ile192Val, Asp207Gly (or Glu207Gly), Asn217Asp, Thr226Ala, Thr245Ala, Thr254Pro, Ile256Leu, Ile256Val, Arg259Cys, and Arg279His.

28. The helper genome, helper vector, system, or method of any one of claims 1-27, wherein the helper genome is present in a cell that comprises a nucleic acid encoding a recombinase for recombination of the direct repeats.

29. The helper genome, helper vector, system, or method of claim 28, wherein the recombinase is a Flp, Cre, Dre, Vika, or PhiC31 recombinase.

30. The helper genome, helper vector, system, or method of claim 28 or claim 29, wherein the cell is a HEK293 cell, optionally wherein the cell is a HEK293 cell that encodes or expresses Cre recombinase, optionally wherein the HEK293 cell that encodes or expresses Cre recombinase is a 116 cell.

31. The helper genome, helper vector, system, or method of any one of claims 1-30, wherein the helper genome comprises an inverted packaging sequence.

32. A recombinant adenoviral helper genome comprising:
a 5′ inverted terminal repeat (ITR);
a 3′ ITR; and
a packaging sequence;
wherein the 5′ ITR, the 3′ ITR, and the packaging sequence are each derived from a species B adenovirus of a serotype selected from Ad3, Ad7, Ad11, Ad14, Ad16, Ad21, Ad34, or Ad50;
wherein the packaging sequence is flanked by or comprises recombinase direct repeats comprising a first recombinase direct repeat and a second recombinase direct repeat;
wherein the position of the first recombinase direct repeat corresponds to a position that is within 10 nucleotides of an L1, L2, L3, or L4 site of a reference sequence for the serotype of the packaging sequence, as set forth in Table 21; and
wherein the position of the second recombinase direct repeat corresponds to a position that is within 10 nucleotides of an R1, R2, or R3 site of a reference sequence for the serotype of the packaging sequence, as set forth in Table 21; and
wherein the helper genome comprises an inverted packaging sequence.

33. The helper genome of claim 32, wherein the 5′ ITR and the 3′ ITR are derived from the same serotype.

34. The helper genome of claim 32 or claim 33, wherein the 5′ ITR, the 3′ ITR, and the packaging sequence are derived from the same serotype.

35. The helper genome of any one of claims 32-34, wherein the recombinase direct repeats that flank the packaging sequence are FRT, loxP, rox, vox, AttB, or AttP sites.

36. The helper genome of any one of claims 32-35, wherein the recombinase direct repeats that flank the packaging sequence are loxP sites.

37. A recombinant adenoviral helper vector comprising the helper genome of any one of claims 32-36.

38. A recombinant adenoviral vector production system comprising:
(i) the helper genome of any one of claims 32-36 or the helper vector of claim 37, and
(ii) a helper-dependent adenoviral (HDAd) donor genome, the HDAd donor genome comprising:
a 5′ inverted terminal repeat (ITR);
a 3′ ITR;
a packaging sequence; and
a nucleic acid sequence encoding at least one heterologous expression product;
wherein the 5′ ITR, the 3′ ITR, and the packaging sequence of the HDAd donor genome are each derived from a species B adenovirus of a serotype selected from Ad3, Ad7, Ad11, Ad14, Ad16, Ad21, Ad34, or Ad50.

39. A method of producing a recombinant helper-dependent adenoviral (HDAd) donor vector, the method comprising isolating the recombinant HDAd donor vector from a culture of cells, wherein the cells comprise:
a recombinant helper genome of any one of claims 32-36 or a recombinant adenoviral helper vector of claim 37; and
a recombinant HDAd donor genome comprising:
a 5′ inverted terminal repeat (ITR);
a 3′ ITR;
an packaging sequence; and
a nucleic acid sequence encoding at least one heterologous expression product;
wherein the 5′ ITR, the 3′ ITR, and the packaging sequence of the HDAd donor genome are each derived from a species B adenovirus of a serotype selected from Ad3, Ad7, Ad11, Ad14, Ad16, Ad21, Ad34, or Ad50.

40. The system or method of claim 38 or claim 39, wherein the 5′ ITR and the 3′ ITR of the HDAd donor genome are derived from the same serotype.

41. The system or method of any one of claims 38-40, wherein the 5′ ITR, the 3′ ITR, and the packaging sequence of the HDAd donor genome are derived from the same serotype.

42. The helper genome, helper vector, system, or method of any one of claims 32-41, wherein the helper genome comprises a nucleic acid sequence that encodes an Ad35 fiber knob.

43. The genome, vector, system, or method of claim 42, wherein the Ad35 fiber knob comprises a mutation that increases affinity with CD46.

44. The helper genome, helper vector, system, or method of claim 42 or claim 43, wherein the Ad35 fiber knob comprises one or more mutations:
selected from Ile192Val, Asp207Gly (or Glu207Gly), Asn217Asp, Thr226Ala, Thr245Ala, Thr254Pro, Ile256Leu, Ile256Val, Arg259Cys, and Arg279His; or
comprising each of mutations Ile192Val, Asp207Gly (or Glu207Gly), Asn217Asp, Thr226Ala, Thr245Ala, Thr254Pro, Ile256Leu, Ile256Val, Arg259Cys, and Arg279His.

45. The helper genome, helper vector, system, or method of any one of claims 32-44, wherein the helper genome is present in a cell that comprises a nucleic acid encoding a recombinase for recombination of the direct repeats.

46. The helper genome, helper vector, system, or method of claim 45, wherein the recombinase is a Flp, Cre, Dre, Vika, or PhiC31 recombinase.

47. The helper genome, helper vector, system, or method of claim 45 or claim 46, wherein the cell is a HEK293 cell, optionally wherein the cell is a HEK293 cell that encodes or expresses Cre recombinase, optionally wherein the HEK293 cell that encodes or expresses Cre recombinase is a 116 cell.

48. The helper genome, helper vector, system, or method of any one of claims 31-47, wherein the inverted packaging sequence comprises the packaging sequence and one or both of the first recombinase direct repeat and the second recombinase direct repeat.

49. The helper genome, helper vector, system, or method of any one of claims 31-48, wherein the inverted packaging sequence comprises, or comprises a first end point at, a nucleotide position corresponding to a position that is within 25 nucleotides of a Left Inversion Point of a reference sequence for the serotype of the packaging sequence (e.g., at the Left Inversion Point, no more than 25 nucleotides 5′ of the Left Inversion Point, and/or no more than 25 nucleotides 3′ of the Left Inversion Point), as set forth in Table 28.

50. The helper genome, helper vector, system, or method of any one of claims 31-48, wherein the inverted packaging sequence comprises, or comprises a first end point at, a nucleotide position corresponding to a position that is within 10 nucleotides of a Left Inversion Point of a reference sequence for the serotype of the packaging sequence, as set forth in Table 28.

51. The helper genome, helper vector, system, or method of any one of claims 31-48, wherein the inverted packaging sequence comprises, or comprises a first end point at, a nucleotide position corresponding to a position at a Left Inversion Point of a reference sequence for the serotype of the packaging sequence, as set forth in Table 28.

52. The helper genome, helper vector, system, or method of any one of claims 31-48, wherein the inverted packaging sequence comprises, or comprises a first end point at, a nucleotide position corresponding to a position at a Left Inversion Point of a reference sequence for the serotype of the packaging sequence, as set forth in any one of Tables 29-35.

53. The helper genome, helper vector, system, or method of any one of claims 31-52, wherein the inverted packaging sequence comprises, or comprises a second end point at, a nucleotide position corresponding to a position that is within 25 nucleotides of a Right Inversion Point of a reference sequence for the serotype of the packaging sequence (e.g., at the Right Inversion Point, no more than 25 nucleotides 5′ of the Right Inversion Point, and/or no more than 25 nucleotides 3′ of the Right Inversion Point), as set forth in Table 28.

54. The helper genome, helper vector, system, or method of any one of claims 31-52, wherein the inverted packaging sequence comprises, or comprises a second end point at, a nucleotide position corresponding to a position that is within 10 nucleotides of a Right Inversion Point of a reference sequence for the serotype of the packaging sequence, as set forth in Table 28.

55. The helper genome, helper vector, system, or method of any one of claims 31-52, wherein the inverted packaging sequence comprises, or comprises a second end point at, a nucleotide position corresponding to a position at a Right Inversion Point of a reference sequence for the serotype of the packaging sequence, as set forth in Table 28.

56. The helper genome, helper vector, system, or method of any one of claims 31-52, wherein the inverted packaging sequence comprises, or comprises a second end point at, a nucleotide position corresponding to a position at a Right Inversion Point of a reference sequence for the serotype of the packaging sequence, as set forth in any one of Tables 29-35.

57. A recombinant recombinase site-flanked adenoviral packaging sequence, wherein recombinase direct repeats flank a packaging sequence, and wherein the packaging sequence is derived from a species B adenovirus of a serotype selected from Ad3, Ad7, Ad11, Ad14, Ad16, Ad21, Ad34, or Ad50; and wherein the packaging sequence corresponds to a fragment of an adenoviral genome having:
(i) a first end point that corresponds to a position that is within 10 nucleotides of an L1, L2, L3, or L4 site of a reference sequence for the serotype of the packaging sequence, as set forth in Table 21, and
(ii) a second end point that corresponds to a position that is within 10 nucleotides of an R1, R2, or R3 site of a reference sequence for the serotype of the packaging sequence, as set forth in Table 21.

58. The recombinant packaging sequence of claim 57, wherein the first end point corresponds to a position that is within 10 nucleotides of an L1 site of a reference sequence for the serotype of the packaging sequence, as set forth in Table 21; and wherein the second end point corresponds to a position that is within 10 nucleotides of an R3 site of a reference sequence for the serotype of the packaging sequence, as set forth in Table 21.

59. The recombinant packaging sequence of claim 57, wherein the first end point corresponds to a position that is within 10 nucleotides of an L2 site of a reference sequence for the serotype of the packaging sequence, as set forth in Table 21; and wherein the second end point corresponds to a position that is within 10 nucleotides of an RI site of a reference sequence for the serotype of the packaging sequence, as set forth in Table 21.

60. The recombinant packaging sequence of claim 57, wherein the first end point corresponds to a position that is within 10 nucleotides of an L3 site of a reference sequence for the serotype of the packaging sequence, as set forth in Table 21; and wherein the second end point corresponds to a position that is within 10 nucleotides of an R2 site of a reference sequence for the serotype of the packaging sequence, as set forth in Table 21.

61. The recombinant packaging sequence of claim 57, wherein the first end point corresponds to a position that is within 10 nucleotides of an L4 site of a reference sequence for the serotype of the packaging sequence, as set forth in Table 21; and wherein the second end point corresponds to a position that is within 10 nucleotides of an RI site of a reference sequence for the serotype of the packaging sequence, as set forth in Table 21.

62. The recombinant packaging sequence of claim 57, wherein the first end point corresponds to a position at an L1, L2, L3, or L4 site of a reference sequence for the serotype of the packaging sequence, as set forth in Table 21; and wherein the second end point corresponds to a position at an R1, R2, or R3 site of a reference sequence for the serotype of the packaging sequence, as set forth in Table 21.

63. The recombinant packaging sequence of claim 57, wherein the first end point corresponds to a position at an L1 site of a reference sequence for the serotype of the packaging sequence, as set forth in Table 21; and wherein the second end point corresponds to a position at an R3 site of a reference sequence for the serotype of the packaging sequence, as set forth in Table 21.

64. The recombinant packaging sequence of claim 57, wherein the first end point corresponds to a position at an L2 site of a reference sequence for the serotype of the packaging sequence, as set forth in Table 21; and wherein the second end point corresponds to a position at an R1 site of a reference sequence for the serotype of the packaging sequence, as set forth in Table 21.

65. The recombinant packaging sequence of claim 57, wherein the first end point corresponds to a position at an L3 site of a reference sequence for the serotype of the packaging sequence, as set forth in Table 21; and wherein the second end point corresponds to a position at an R2 site of a reference sequence for the serotype of the packaging sequence, as set forth in Table 21.

66. The recombinant packaging sequence of claim 57, wherein the first end point corresponds to a position at an L4 site of a reference sequence for the serotype of the packaging sequence, as set forth in Table 21; and wherein the second end point corresponds to a position at an R1 site of a reference sequence for the serotype of the packaging sequence, as set forth in Table 21.

67. The recombinant packaging sequence of claim 57, wherein the first end point corresponds to a position at an L1, L2, L3, or L4 site of a reference sequence for the serotype of the packaging sequence, as set forth in any one of Tables 22-27; and wherein the second end point corresponds to a position at an R1, R2, or R3 site of a reference sequence for the serotype of the packaging sequence, as set forth in any one of Tables 22-27.

68. The recombinant packaging sequence of claim 57, wherein the first end point corresponds to a position at an L1 site of a reference sequence for the serotype of the packaging sequence, as set forth in any one of Tables 22-27; and wherein the second end point corresponds to a position at an R3 site of a reference sequence for the serotype of the packaging sequence, as set forth in any one of Tables 22-27.

69. The recombinant packaging sequence of claim 57, wherein the first end point corresponds to a position at an L2 site of a reference sequence for the serotype of the packaging sequence, as set forth in any one of Tables 22-27; and wherein the second end point corresponds to a position at an R1 site of a reference sequence for the serotype of the packaging sequence, as set forth in any one of Tables 22-27.

70. The recombinant packaging sequence of claim 57, wherein the first end point corresponds to a position at an L3 site of a reference sequence for the serotype of the packaging sequence, as set forth in any one of Tables 22-27; and wherein the second end point corresponds to a position at an R2 site of a reference sequence for the serotype of the packaging sequence, as set forth in any one of Tables 22-27.

71. The recombinant packaging sequence of claim 57, wherein the first end point corresponds to a position at an L4 site of a reference sequence for the serotype of the packaging sequence, as set forth in any one of Tables 22-27; and wherein the second end point corresponds to a position at an R1 site of a reference sequence for the serotype of the packaging sequence, as set forth in any one of Tables 22-27.

72. The recombinant packaging sequence of any one of claims 57-71, wherein the packaging sequence is present in an adenoviral genome and is inverted, optionally wherein the packaging sequence is inverted as compared to a 5′ITR of the adenoviral genome.

73. A recombinant adenoviral helper genome comprising:
a 5′ inverted terminal repeat (ITR);
a 3′ ITR; and
an inverted sequence comprising a packaging sequence;
wherein the 5′ ITR, the 3′ ITR, and the packaging sequence are each derived from a species B adenovirus of a serotype selected from Ad3, Ad7, Ad11, Ad14, Ad16, Ad21, Ad34, or Ad50; and
wherein the inverted sequence comprises, or comprises a first end point at, a nucleotide position corresponding to a position within 25 nucleotides of a Left Inversion Point (e.g., within 10 nucleotides of a Left Inversion Point, e.g., at a Left Inversion Point) of a reference sequence for the serotype of the packaging sequence, as set forth in Table 28; and
wherein the inverted sequence comprises, or comprises a second end point at, a nucleotide position corresponding to a position within 25 nucleotides of a Right Inversion Point (e.g., within 10 nucleotides of a Right Inversion Point, e.g., at a Right Inversion Point) of a reference sequence for the serotype of the packaging sequence, as set forth in Table 28.

74. The recombinant adenoviral helper genome of claim 73, wherein the 5′ ITR and the 3′ ITR are derived from the same serotype.

75. The recombinant adenoviral helper genome of claim 73 or claim 74, wherein the 5′ ITR, the 3′ ITR, and the packaging sequence are derived from the same serotype.

76. The recombinant adenoviral helper genome of any one of claims 73-75, wherein recombinase direct repeats flank the packaging sequence.

The application's sequence listing, which the Patent Office published only in electronic form, follows.

SEQUENCE LISTING (297 sequences)

SEQ ID NO: 1 - DNA, 34 bp, synthetic construct
  misc_feature 1..34: note = Synthetic
  source 1..34: mol_type = other DNA
ataacttcgtataatgtatgctatacgaagttat

SEQ ID NO: 2 - DNA, 34 bp, synthetic construct
  misc_feature 1..34: note = Synthetic
  source 1..34: mol_type = other DNA
ataacttcgtataaagtatcctatacgaagttat

SEQ ID NO: 3 - DNA, 34 bp, synthetic construct
  misc_feature 1..34: note = Synthetic
  source 1..34: mol_type = other DNA
ataacttcgtataatgtatactatacgaagttat

SEQ ID NO: 4 - DNA, 34 bp, synthetic construct
  misc_feature 1..34: note = Synthetic
  source 1..34: mol_type = other DNA
ataacttcgtatannntannntatacgaacggta

SEQ ID NO: 5 - DNA, 34 bp, synthetic construct
  misc_feature 1..34: note = Synthetic
  source 1..34: mol_type = other DNA
taccgttcgtatannntannntatacgaagttat

SEQ ID NO: 6 - DNA, 34 bp, synthetic construct
  misc_feature 1..34: note = Synthetic
  source 1..34: mol_type = other DNA
ataacttcgtataagaaaccatatacgaagttat

SEQ ID NO: 7 - DNA, 34 bp, synthetic construct
  misc_feature 1..34: note = Synthetic
  source 1..34: mol_type = other DNA
ataacttcgtatataataccatatacgaagttat

SEQ ID NO: 8 - DNA, 34 bp, synthetic construct
  misc_feature 1..34: note = Synthetic
  source 1..34: mol_type = other DNA
ataacttcgtataagatagaatatacgaagttat

SEQ ID NO: 9 - DNA, 34 bp, synthetic construct
  misc_feature 1..34: note = Synthetic
  source 1..34: mol_type = other DNA
ataacttcgtatacgataccatatacgaagttat

SEQ ID NO: 10 - DNA, 34 bp, synthetic construct
  misc_feature 1..34: note = Synthetic
  source 1..34: mol_type = other DNA
ataacttcgtataatgtgtactatacgaagttat

SEQ ID NO: 11 - DNA, 34 bp, synthetic construct
  misc_feature 1..34: note = Synthetic
  source 1..34: mol_type = other DNA
gaagttcctattctctagaaagtataggaacttc

SEQ ID NO: 12-14 - skipped (3 entries)

SEQ ID NO: 15 - DNA, 93 bp, synthetic construct
  misc_feature 1..93: note = Synthetic
  source 1..93: mol_type = other DNA
ttatggccggccgggtggagtttttttgcaagttgtcgcgggaaatgttacgcataaaaaggcttcttttctcacggaactacttagttttcc

SEQ ID NO: 16 - DNA, 476 bp, synthetic construct
  misc_feature 1..476: note = Synthetic
  source 1..476: mol_type = other DNA
ctatctatataatataccttatagatggaatggtgccaatatgtaaatgaggtgattttaaaaagtgtgggccgtgtggtgattggctgtggggttaacggttaaaaggggcggcgcggccgtgggaaaatgacgttttatggccggccgggtggagtttttttgcaagttgtcgcgggaaatgttacgcataaaaaggcttcttttctcacggaactacttagttttccataacttcgtatagcatacattatacgaagttatcacggtatttaacaggaaatgaggtagttttgaccggatgcaagtgaaaattgctgattttcgcgcgaaaactgaatgaggaagtgtttttctgaataatgtggtatttatggcagggtggagtatttgttcagggccaggtagactttgacccattacgtggaggtttcgattaccgataacttcgtatagcatacattatacgaagttat

SEQ ID NO: 17 - DNA, 137 bp, synthetic construct
  misc_feature 1..137: note = Synthetic
  source 1..137: mol_type = other DNA
ctatctatataatataccttatagatggaatggtgccaatatgtaaatgaggtgattttaaaaagtgtgggccgtgtggtgattggctgtggggttaacggttaaaaggggcggcgcggccgtgggaaaatgacgtt

SEQ ID NO: 18 - DNA, 34 bp, synthetic construct
  misc_feature 1..34: note = Synthetic
  source 1..34: mol_type = other DNA
ataacttcgtatagcatacattatacgaagttat

SEQ ID NO: 19 - DNA, 178 bp, synthetic construct
  misc_feature 1..178: note = Synthetic
  source 1..178: mol_type = other DNA
cacggtatttaacaggaaatgaggtagttttgaccggatgcaagtgaaaattgctgattttcgcgcgaaaactgaatgaggaagtgtttttctgaataatgtggtatttatggcagggtggagtatttgttcagggccaggtagactttgacccattacgtggaggtttcgattaccg

SEQ ID NO: 20 - DNA, 40 bp, synthetic construct
  misc_feature 1..40: note = Synthetic
  source 1..40: mol_type = other DNA
ttatggccggccgggtggagtttttttgcaagttgtcgcg

SEQ ID NO: 21 - DNA, 476 bp, synthetic construct
  misc_feature 1..476: note = Synthetic
  source 1..476: mol_type = other DNA
ctatctatataatataccttatagatggaatggtgccaatatgtaaatgaggtgattttaaaaagtgtgggccgtgtggtgattggctgtggggttaacggttaaaaggggcggcgcggccgtgggaaaatgacgttttatggccggccgggtggagtttttttgcaagttgtcgcgataacttcgtatagcatacattatacgaagttatggaaatgttacgcataaaaaggcttcttttctcacggaactacttagttttcccacggtatttaacaggaaatgaggtagttttgaccggatgcaagtgaaaattgctgattttcgcgcgaaaactgaatgaggaagtgtttttctgaataatgtggtatttatggcagggtggagtatttgttcagggccaggtagactttgacccattacgtggaggtttcgattaccgataacttcgtatagcatacattatacgaagttat

SEQ ID NO: 22 - DNA, 231 bp, synthetic construct
  misc_feature 1..231: note = Synthetic
  source 1..231: mol_type = other DNA
ggaaatgttacgcataaaaaggcttcttttctcacggaactacttagttttcccacggtatttaacaggaaatgaggtagttttgaccggatgcaagtgaaaattgctgattttcgcgcgaaaactgaatgaggaagtgtttttctgaataatgtggtatttatggcagggtggagtatttgttcagggccaggtagactttgacccattacgtggaggtttcgattaccg

SEQ ID NO: 23 - DNA, 64 bp, synthetic construct
  misc_feature 1..64: note = Synthetic
  source 1..64: mol_type = other DNA
ttatggccggccgggtggagtttttttgcaagttgtcgcgggaaatgttacgcataaaaaggct

SEQ ID NO: 24 - DNA, 553 bp, synthetic construct
  misc_feature 1..553: note = Synthetic
  source 1..553: mol_type = other DNA
ctatctatataatataccttatagatggaatggtgccaatatgtaaatgaggtgattttaaaaagtgtgggccgtgtggtgattggctgtggggttaacggttaaaaggggcggcgcggccgtgggaaaatgacgttttatggccggccgggtggagtttttttgcaagttgtcgcgggaaatgttacgcataaaaaggctataacttcgtatagcatacattatacgaagttattcttttctcacggaactacttagttttcccacggtatttaacaggaaatgaggtagttttgaccggatgcaagtgaaaattgctgattttcgcgcgaaaactgaatgaggaagtgtttttctgaataatgtggtatttatggcagggtggagtatttgttcagggccaggtagactttgacccattacgtggaggtttcgattaccgtgttttttacctgaatttccgcgtaccgtgtcaaagtcttctgtttttacgtaggtgtcagctgatcgctagggtatataacttcgtatagcatacattatacgaagttat

SEQ ID NO: 25 - DNA, 284 bp, synthetic construct
  misc_feature 1..284: note = Synthetic
  source 1..284: mol_type = other DNA
tcttttctcacggaactacttagttttcccacggtatttaacaggaaatgaggtagttttgaccggatgcaagtgaaaattgctgattttcgcgcgaaaactgaatgaggaagtgtttttctgaataatgtggtatttatggcagggtggagtatttgttcagggccaggtagactttgacccattacgtggaggtttcgattaccgtgttttttacctgaatttccgcgtaccgtgtcaaagtcttctgtttttacgtaggtgtcagctgatcgctagggtat

SEQ ID NO: 26 - DNA, 30 bp, synthetic construct
  misc_feature 1..30: note = Synthetic
  source 1..30: mol_type = other DNA
ttatggccggccgggtggagtttttttgca

SEQ ID NO: 27 - DNA, 572 bp, synthetic construct
  misc_feature 1..572: note = Synthetic
  source 1..572: mol_type = other DNA
ctatctatataatataccttatagatggaatggtgccaatatgtaaatgaggtgattttaaaaagtgtgggccgtgtggtgattggctgtggggttaacggttaaaaggggcggcgcggccgtgggaaaatgacgttttatggccggccgggtggagtttttttgcaataacttcgtatagcatacattatacgaagttatagttgtcgcgggaaatgttacgcataaaaaggcttcttttctcacggaactacttagttttcccacggtatttaacaggaaatgaggtagttttgaccggatgcaagtgaaaattgctgattttcgcgcgaaaactgaatgaggaagtgtttttctgaataatgtggtatttatggcagggtggagtatttgttcagggccaggtagactttgacccattacgtggaggtttcgattaccgtgttttttacctgaatttccgcgtaccgtgtcaaagtcttctgtttttacgtaggtgtcagctgatcgctagggtatttagggataacagggtaatataacttcgtatagcatacattatacgaagttat

SEQ ID NO: 28 - DNA, 337 bp, synthetic construct
  misc_feature 1..337: note = Synthetic
  source 1..337: mol_type = other DNA
agttgtcgcgggaaatgttacgcataaaaaggcttcttttctcacggaactacttagttttcccacggtatttaacaggaaatgaggtagttttgaccggatgcaagtgaaaattgctgattttcgcgcgaaaactgaatgaggaagtgtttttctgaataatgtggtatttatggcagggtggagtatttgttcagggccaggtagactttgacccattacgtggaggtttcgattaccgtgttttttacctgaatttccgcgtaccgtgtcaaagtcttctgtttttacgtaggtgtcagctgatcgctagggtatttagggataacagggtaat

SEQ ID NO: 29 - DNA, 18 bp, synthetic construct
  misc_feature 1..18: note = Synthetic
  source 1..18: mol_type = other DNA
tagggataacagggtaat

SEQ ID NO: 30 - skipped

SEQ ID NO: 31 - DNA, 580 bp, synthetic construct
  misc_feature 1..580: note = Synthetic
  source 1..580: mol_type = other DNA
ctatctatataatataccttatagatggaatggtgccaatatgtaaatgaggtgattttaaaaagtgtgggccgtgtggtgattggctgtggggttaacggttaaaaggggcggcgcggccgtgggaaaatgacgttttatggccggccattaccctgttatccctaaataccctagcgatcagctgacacctacgtaaaaacagaagactttgacacggtacgcggaaattcaggtaaaaaacaataacttcgtataatgtatgctatacgaagttatcggtaatcgaaacctccacgtaatgggtcaaagtctacctggccctgaacaaatactccaccctgccataaataccacattattcagaaaaacacttcctcattcagttttcgcgcgaaaatcagcaattttcacttgcatccggtcaaaactacctcatttcctgttaaataccgtgataacttcgtataatgtatgctatacgaagttatggaaaactaagtagttccgtgagaaaagaagcctttttatgcgtaacatttcccgcgacaacttgcaaaaaaactccacccggccggcc

SEQ ID NO: 32 - DNA, 423 bp, synthetic construct
  misc_feature 1..423: note = Synthetic
  source 1..423: mol_type = other DNA
attaccctgttatccctaaataccctagcgatcagctgacacctacgtaaaaacagaagactttgacacggtacgcggaaattcaggtaaaaaacaataacttcgtataatgtatgctatacgaagttatcggtaatcgaaacctccacgtaatgggtcaaagtctacctggccctgaacaaatactccaccctgccataaataccacattattcagaaaaacacttcctcattcagttttcgcgcgaaaatcagcaattttcacttgcatccggtcaaaactacctcatttcctgttaaataccgtgataacttcgtataatgtatgctatacgaagttatggaaaactaagtagttccgtgagaaaagaagcctttttatgcgtaacatttcccgcgacaacttgcaaaaaaactccaccc

SEQ ID NO: 33 - DNA, 178 bp, synthetic construct
  misc_feature 1..178: note = Synthetic
  source 1..178: mol_type = other DNA
cggtaatcgaaacctccacgtaatgggtcaaagtctacctggccctgaacaaatactccaccctgccataaataccacattattcagaaaaacacttcctcattcagttttcgcgcgaaaatcagcaattttcacttgcatccggtcaaaactacctcatttcctgttaaataccgtg

SEQ ID NO: 34 - DNA, 580 bp, synthetic construct
  misc_feature 1..580: note = Synthetic
  source 1..580: mol_type = other DNA
ctatctatataatataccttatagatggaatggtgccaatatgtaaatgaggtgattttaaaaagtgtgggccgtgtggtgattggctgtggggttaacggttaaaaggggcggcgcggccgtgggaaaatgacgttttatggccggccattaccctgttatccctaaataccctagcgatcagctgacacctacgtaaaaacagaagactttgacacggtacgcggaaattcaggtaaaaaacaataacttcgtataatgtatgctatacgaagttatcggtaatcgaaacctccacgtaatgggtcaaagtctacctggccctgaacaaatactccaccctgccataaataccacattattcagaaaaacacttcctcattcagttttcgcgcgaaaatcagcaattttcacttgcatccggtcaaaactacctcatttcctgttaaataccgtgggaaaactaagtagttccgtgagaaaagaagcctttttatgcgtaacatttccataacttcgtataatgtatgctatacgaagttatcgcgacaacttgcaaaaaaactccacccggccggcc

SEQ ID NO: 35 - DNA, 423 bp, synthetic construct
  misc_feature 1..423: note = Synthetic
  source 1..423: mol_type = other DNA
attaccctgttatccctaaataccctagcgatcagctgacacctacgtaaaaacagaagactttgacacggtacgcggaaattcaggtaaaaaacaataacttcgtataatgtatgctatacgaagttatcggtaatcgaaacctccacgtaatgggtcaaagtctacctggccctgaacaaatactccaccctgccataaataccacattattcagaaaaacacttcctcattcagttttcgcgcgaaaatcagcaattttcacttgcatccggtcaaaactacctcatttcctgttaaataccgtgggaaaactaagtagttccgtgagaaaagaagcctttttatgcgtaacatttccataacttcgtataatgtatgctatacgaagttatcgcgacaacttgcaaaaaaactccaccc

SEQ ID NO: 36 - DNA, 231 bp, synthetic construct
  misc_feature 1..231: note = Synthetic
  source 1..231: mol_type = other DNA
cggtaatcgaaacctccacgtaatgggtcaaagtctacctggccctgaacaaatactccaccctgccataaataccacattattcagaaaaacacttcctcattcagttttcgcgcgaaaatcagcaattttcacttgcatccggtcaaaactacctcatttcctgttaaataccgtgggaaaactaagtagttccgtgagaaaagaagcctttttatgcgtaacatttcc

SEQ ID NO: 37 - DNA, 580 bp, synthetic construct
  misc_feature 1..580: note = Synthetic
  source 1..580: mol_type = other DNA
ctatctatataatataccttatagatggaatggtgccaatatgtaaatgaggtgattttaaaaagtgtgggccgtgtggtgattggctgtggggttaacggttaaaaggggcggcgcggccgtgggaaaatgacgttttatggccggccattaccctgttatccctaaataacttcgtataatgtatgctatacgaagttatataccctagcgatcagctgacacctacgtaaaaacagaagactttgacacggtacgcggaaattcaggtaaaaaacacggtaatcgaaacctccacgtaatgggtcaaagtctacctggccctgaacaaatactccaccctgccataaataccacattattcagaaaaacacttcctcattcagttttcgcgcgaaaatcagcaattttcacttgcatccggtcaaaactacctcatttcctgttaaataccgtgggaaaactaagtagttccgtgagaaaagaataacttcgtataatgtatgctatacgaagttatagcctttttatgcgtaacatttcccgcgacaacttgcaaaaaaactccacccggccggcc

SEQ ID NO: 38 - DNA, 423 bp, synthetic construct
  misc_feature 1..423: note = Synthetic
  source 1..423: mol_type = other DNA
attaccctgttatccctaaataacttcgtataatgtatgctatacgaagttatataccctagcgatcagctgacacctacgtaaaaacagaagactttgacacggtacgcggaaattcaggtaaaaaacacggtaatcgaaacctccacgtaatgggtcaaagtctacctggccctgaacaaatactccaccctgccataaataccacattattcagaaaaacacttcctcattcagttttcgcgcgaaaatcagcaattttcacttgcatccggtcaaaactacctcatttcctgttaaataccgtgggaaaactaagtagttccgtgagaaaagaataacttcgtataatgtatgctatacgaagttatagcctttttatgcgtaacatttcccgcgacaacttgcaaaaaaactccaccc

SEQ ID NO: 39 - DNA, 284 bp, synthetic construct
  misc_feature 1..284: note = Synthetic
  source 1..284: mol_type = other DNA
ataccctagcgatcagctgacacctacgtaaaaacagaagactttgacacggtacgcggaaattcaggtaaaaaacacggtaatcgaaacctccacgtaatgggtcaaagtctacctggccctgaacaaatactccaccctgccataaataccacattattcagaaaaacacttcctcattcagttttcgcgcgaaaatcagcaattttcacttgcatccggtcaaaactacctcatttcctgttaaataccgtgggaaaactaagtagttccgtgagaaaaga

SEQ ID NO: 40 - DNA, 580 bp, synthetic construct
  misc_feature 1..580: note = Synthetic
  source 1..580: mol_type = other DNA
ctatctatataatataccttatagatggaatggtgccaatatgtaaatgaggtgattttaaaaagtgtgggccgtgtggtgattggctgtggggttaacggttaaaaggggcggcgcggccgtgggaaaatgacgttttatggccggccataacttcgtataatgtatgctatacgaagttatattaccctgttatccctaaataccctagcgatcagctgacacctacgtaaaaacagaagactttgacacggtacgcggaaattcaggtaaaaaacacggtaatcgaaacctccacgtaatgggtcaaagtctacctggccctgaacaaatactccaccctgccataaataccacattattcagaaaaacacttcctcattcagttttcgcgcgaaaatcagcaattttcacttgcatccggtcaaaactacctcatttcctgttaaataccgtgggaaaactaagtagttccgtgagaaaagaagcctttttatgcgtaacatttcccgcgacaactataacttcgtataatgtatgctatacgaagttattgcaaaaaaactccacccggccggcc

SEQ ID NO: 41 - DNA, 423 bp, synthetic construct
  misc_feature 1..423: note = Synthetic
  source 1..423: mol_type = other DNA
ataacttcgtataatgtatgctatacgaagttatattaccctgttatccctaaataccctagcgatcagctgacacctacgtaaaaacagaagactttgacacggtacgcggaaattcaggtaaaaaacacggtaatcgaaacctccacgtaatgggtcaaagtctacctggccctgaacaaatactccaccctgccataaataccacattattcagaaaaacacttcctcattcagttttcgcgcgaaaatcagcaattttcacttgcatccggtcaaaactacctcatttcctgttaaataccgtgggaaaactaagtagttccgtgagaaaagaagcctttttatgcgtaacatttcccgcgacaactataacttcgtataatgtatgctatacgaagttattgcaaaaaaactccaccc

SEQ ID NO: 42 - DNA, 337 bp, synthetic construct
  misc_feature 1..337: note = Synthetic
  source 1..337: mol_type = other DNA
attaccctgttatccctaaataccctagcgatcagctgacacctacgtaaaaacagaagactttgacacggtacgcggaaattcaggtaaaaaacacggtaatcgaaacctccacgtaatgggtcaaagtctacctggccctgaacaaatactccaccctgccataaataccacattattcagaaaaacacttcctcattcagttttcgcgcgaaaatcagcaattttcacttgcatccggtcaaaactacctcatttcctgttaaataccgtgggaaaactaagtagttccgtgagaaaagaagcctttttatgcgtaacatttcccgcgacaact

SEQ ID NO: 43 - DNA, 580 bp, synthetic construct
  misc_feature 1..580: note = Synthetic
  source 1..580: mol_type = other DNA
ctatctatataatataccttatagatggaatggtgccaatatgtaaatgaggtgattttaaaaagtgtgggccgtgtggtgattggctgtggggttaacggttaaaaggggcggcgcggccgtgggaaaatgacgttttatggccggccgggtggagtttttttgcaagttgtcgcgggaaatgttacgcataaaaaggcttcttttctcacggaactacttagttttccataacttcgtatagcatacattatacgaagttatcacggtatttaacaggaaatgaggtagttttgaccggatgcaagtgaaaattgctgattttcgcgcgaaaactgaatgaggaagtgtttttctgaataatgtggtatttatggcagggtggagtatttgttcagggccaggtagactttgacccattacgtggaggtttcgattaccgataacttcgtatagcatacattatacgaagttattgttttttacctgaatttccgcgtaccgtgtcaaagtcttctgtttttacgtaggtgtcagctgatcgctagggtatttagggataacagggtaatggccggcc

SEQ ID NO: 44 - DNA, 580 bp, synthetic construct
  misc_feature 1..580: note = Synthetic
  source 1..580: mol_type = other DNA
ggccggccattaccctgttatccctaaataccctagcgatcagctgacacctacgtaaaaacagaagactttgacacggtacgcggaaattcaggtaaaaaacaataacttcgtataatgtatgctatacgaagttatcggtaatcgaaacctccacgtaatgggtcaaagtctacctggccctgaacaaatactccaccctgccataaataccacattattcagaaaaacacttcctcattcagttttcgcgcgaaaatcagcaattttcacttgcatccggtcaaaactacctcatttcctgttaaataccgtgataacttcgtataatgtatgctatacgaagttatggaaaactaagtagttccgtgagaaaagaagcctttttatgcgtaacatttcccgcgacaacttgcaaaaaaactccacccggccggccataaaacgtcattttcccacggccgcgccgccccttttaaccgttaaccccacagccaatcaccacacggcccacactttttaaaatcacctcatttacatattggcaccattccatctataaggtatattatatagatag

SEQ ID NO: 45 - DNA, 580 bp, synthetic construct
  misc_feature 1..580: note = Synthetic
  source 1..580: mol_type = other DNA
ctatctatataatataccttatagatggaatggtgccaatatgtaaatgaggtgattttaaaaagtgtgggccgtgtggtgattggctgtggggttaacggttaaaaggggcggcgcggccgtgggaaaatgacgttttatggccggccgggtggagtttttttgcaagttgtcgcgataacttcgtatagcatacattatacgaagttatggaaatgttacgcataaaaaggcttcttttctcacggaactacttagttttcccacggtatttaacaggaaatgaggtagttttgaccggatgcaagtgaaaattgctgattttcgcgcgaaaactgaatgaggaagtgtttttctgaataatgtggtatttatggcagggtggagtatttgttcagggccaggtagactttgacccattacgtggaggtttcgattaccgataacttcgtatagcatacattatacgaagttattgttttttacctgaatttccgcgtaccgtgtcaaagtcttctgtttttacgtaggtgtcagctgatcgctagggtatttagggataacagggtaatggccggcc

SEQ ID NO: 46 - DNA, 580 bp, synthetic construct
  misc_feature 1..580: note = Synthetic
  source 1..580: mol_type = other DNA
ggccggccattaccctgttatccctaaataccctagcgatcagctgacacctacgtaaaaacagaagactttgacacggtacgcggaaattcaggtaaaaaacaataacttcgtataatgtatgctatacgaagttatcggtaatcgaaacctccacgtaatgggtcaaagtctacctggccctgaacaaatactccaccctgccataaataccacattattcagaaaaacacttcctcattcagttttcgcgcgaaaatcagcaattttcacttgcatccggtcaaaactacctcatttcctgttaaataccgtgggaaaactaagtagttccgtgagaaaagaagcctttttatgcgtaacatttccataacttcgtataatgtatgctatacgaagttatcgcgacaacttgcaaaaaaactccacccggccggccataaaacgtcattttcccacggccgcgccgccccttttaaccgttaaccccacagccaatcaccacacggcccacactttttaaaatcacctcatttacatattggcaccattccatctataaggtatattatatagatag

SEQ ID NO: 47 - DNA, 580 bp, synthetic construct
  misc_feature 1..580: note = Synthetic
  source 1..580: mol_type = other DNA
ctatctatataatataccttatagatggaatggtgccaatatgtaaatgaggtgattttaaaaagtgtgggccgtgtggtgattggctgtggggttaacggttaaaaggggcggcgcggccgtgggaaaatgacgttttatggccggccgggtggagtttttttgcaagttgtcgcgggaaatgttacgcataaaaaggctataacttcgtatagcatacattatacgaagttattcttttctcacggaactacttagttttcccacggtatttaacaggaaatgaggtagttttgaccggatgcaagtgaaaattgctgattttcgcgcgaaaactgaatgaggaagtgtttttctgaataatgtggtatttatggcagggtggagtatttgttcagggccaggtagactttgacccattacgtggaggtttcgattaccgtgttttttacctgaatttccgcgtaccgtgtcaaagtcttctgtttttacgtaggtgtcagctgatcgctagggtatataacttcgtatagcatacattatacgaagttatttagggataacagggtaatggccggcc

SEQ ID NO: 48 - DNA, 580 bp, synthetic construct
  misc_feature 1..580: note = Synthetic
  source 1..580: mol_type = other DNA
ggccggccattaccctgttatccctaaataacttcgtataatgtatgctatacgaagttatataccctagcgatcagctgacacctacgtaaaaacagaagactttgacacggtacgcggaaattcaggtaaaaaacacggtaatcgaaacctccacgtaatgggtcaaagtctacctggccctgaacaaatactccaccctgccataaataccacattattcagaaaaacacttcctcattcagttttcgcgcgaaaatcagcaattttcacttgcatccggtcaaaactacctcatttcctgttaaataccgtgggaaaactaagtagttccgtgagaaaagaataacttcgtataatgtatgctatacgaagttatagcctttttatgcgtaacatttcccgcgacaacttgcaaaaaaactccacccggccggccataaaacgtcattttcccacggccgcgccgccccttttaaccgttaaccccacagccaatcaccacacggcccacactttttaaaatcacctcatttacatattggcaccattccatctataaggtatattatatagatag

SEQ ID NO: 49 - DNA, 580 bp, synthetic construct
  misc_feature 1..580: note = Synthetic
  source 1..580: mol_type = other DNA
ctatctatataatataccttatagatggaatggtgccaatatgtaaatgaggtgattttaaaaagtgtgggccgtgtggtgattggctgtggggttaacggttaaaaggggcggcgcggccgtgggaaaatgacgttttatggccggccgggtggagtttttttgcaataacttcgtatagcatacattatacgaagttatagttgtcgcgggaaatgttacgcataaaaaggcttcttttctcacggaactacttagttttcccacggtatttaacaggaaatgaggtagttttgaccggatgcaagtgaaaattgctgattttcgcgcgaaaactgaatgaggaagtgtttttctgaataatgtggtatttatggcagggtggagtatttgttcagggccaggtagactttgacccattacgtggaggtttcgattaccgtgttttttacctgaatttccgcgtaccgtgtcaaagtcttctgtttttacgtaggtgtcagctgatcgctagggtatttagggataacagggtaatataacttcgtatagcatacattatacgaagttatggccggcc

SEQ ID NO: 50 - DNA, 580 bp, synthetic construct
  misc_feature 1..580: note = Synthetic
  source 1..580: mol_type = other DNA
ggccggccataacttcgtataatgtatgctatacgaagttatattaccctgttatccctaaataccctagcgatcagctgacacctacgtaaaaacagaagactttgacacggtacgcggaaattcaggtaaaaaacacggtaatcgaaacctccacgtaatgggtcaaagtctacctggccctgaacaaatactccaccctgccataaataccacattattcagaaaaacacttcctcattcagttttcgcgcgaaaatcagcaattttcacttgcatccggtcaaaactacctcatttcctgttaaataccgtgggaaaactaagtagttccgtgagaaaagaagcctttttatgcgtaacatttcccgcgacaactataacttcgtataatgtatgctatacgaagttattgcaaaaaaactccacccggccggccataaaacgtcattttcccacggccgcgccgccccttttaaccgttaaccccacagccaatcaccacacggcccacactttttaaaatcacctcatttacatattggcaccattccatctataaggtatattatatagatag

SEQ ID NO: 51 - DNA, 580 bp, synthetic construct
  misc_feature 1..580: note = Synthetic
  source 1..580: mol_type = other DNA
catcatcaataatataccttatagatggaatggtgccaatatgtaaatgaggtgattttaaaaagtgtgggccgtgtggtgattggctgtggggttaacggttaaaaggggcggcgcggccgtgggaaaatgacgttttatgggggtggagtttttttgcaagttgtcgcgggaaatgttacgcataaaaaggcttcttttctcacatttaaatataacttcgtatagcatacattatacgaagttatctcgaggcgtcacggaactacttagttttcccacggtatttaacaggaaatgaggtagttttgaccggatgcaagtgaaaattgctgattttcgcgcgaaaactgaatgaggaagtgtttttctgaataatgtggtatttatggcagggtggagtatttgttcagggccaggtagactttgacccattacgtggaggtttcgattaccgtgttttttacctgaatttccgcgtaccgtgtcaaagtcttctgtttttacgtaggtgtcagctgatcgctagggtatttataacttcgtatagcatacattatacgaagttatatttaaatta

SEQ ID NO: 52 - DNA, 580 bp, synthetic construct
  misc_feature 1..580: note = Synthetic
  source 1..580: mol_type = other DNA
taatttaaatataacttcgtataatgtatgctatacgaagttataaataccctagcgatcagctgacacctacgtaaaaacagaagactttgacacggtacgcggaaattcaggtaaaaaacacggtaatcgaaacctccacgtaatgggtcaaagtctacctggccctgaacaaatactccaccctgccataaataccacattattcagaaaaacacttcctcattcagttttcgcgcgaaaatcagcaattttcacttgcatccggtcaaaactacctcatttcctgttaaataccgtgggaaaactaagtagttccgtgacgcctcgagataacttcgtataatgtatgctatacgaagttatatttaaatgtgagaaaagaagcctttttatgcgtaacatttcccgcgacaacttgcaaaaaaactccacccccataaaacgtcattttcccacggccgcgccgccccttttaaccgttaaccccacagccaatcaccacacggcccacactttttaaaatcacctcatttacatattggcaccattccatctataaggtatattattgatgatg

SEQ ID NO: 53 - DNA, 580 bp, synthetic construct; identical to SEQ ID NO: 31
  misc_feature 1..580: note = Synthetic
  source 1..580: mol_type = other DNA

SEQ ID NO: 54 - DNA, 580 bp, synthetic construct
  misc_feature 1..580: note = Synthetic
  source 1..580: mol_type = other DNA
ggccggccgggtggagtttttttgcaagttgtcgcgggaaatgttacgcataaaaaggcttcttttctcacggaactacttagttttccataacttcgtatagcatacattatacgaagttatcacggtatttaacaggaaatgaggtagttttgaccggatgcaagtgaaaattgctgattttcgcgcgaaaactgaatgaggaagtgtttttctgaataatgtggtatttatggcagggtggagtatttgttcagggccaggtagactttgacccattacgtggaggtttcgattaccgataacttcgtatagcatacattatacgaagttattgttttttacctgaatttccgcgtaccgtgtcaaagtcttctgtttttacgtaggtgtcagctgatcgctagggtatttagggataacagggtaatggccggccataaaacgtcattttcccacggccgcgccgccccttttaaccgttaaccccacagccaatcaccacacggcccacactttttaaaatcacctcatttacatattggcaccattccatctataaggtatattatatagatag

SEQ ID NO: 55 - DNA, 580 bp, synthetic construct; identical to SEQ ID NO: 34
  misc_feature 1..580: note = Synthetic
  source 1..580: mol_type = other DNA

SEQ ID NO: 56 - DNA, 580 bp, synthetic construct
  misc_feature 1..580: note = Synthetic
  source 1..580: mol_type = other DNA
ggccggccgggtggagtttttttgcaagttgtcgcgataacttcgtatagcatacattatacgaagttatggaaatgttacgcataaaaaggcttcttttctcacggaactacttagttttcccacggtatttaacaggaaatgaggtagttttgaccggatgcaagtgaaaattgctgattttcgcgcgaaaactgaatgaggaagtgtttttctgaataatgtggtatttatggcagggtggagtatttgttcagggccaggtagactttgacccattacgtggaggtttcgattaccgataacttcgtatagcatacattatacgaagttattgttttttacctgaatttccgcgtaccgtgtcaaagtcttctgtttttacgtaggtgtcagctgatcgctagggtatttagggataacagggtaatggccggccataaaacgtcattttcccacggccgcgccgccccttttaaccgttaaccccacagccaatcaccacacggcccacactttttaaaatcacctcatttacatattggcaccattccatctataaggtatattatatagatag

SEQ ID NO: 57 - DNA, 580 bp, synthetic construct; identical to SEQ ID NO: 37
  misc_feature 1..580: note = Synthetic
  source 1..580: mol_type = other DNA

SEQ ID NO: 58 - DNA, 580 bp, synthetic construct
  misc_feature 1..580: note = Synthetic
  source 1..580: mol_type = other DNA
ggccggccgggtggagtttttttgcaagttgtcgcgggaaatgttacgcataaaaaggctataacttcgtatagcatacattatacgaagttattcttttctcacggaactacttagttttcccacggtatttaacaggaaatgaggtagttttgaccggatgcaagtgaaaattgctgattttcgcgcgaaaactgaatgaggaagtgtttttctgaataatgtggtatttatggcagggtggagtatttgttcagggccaggtagactttgacccattacgtggaggtttcgattaccgtgttttttacctgaatttccgcgtaccgtgtcaaagtcttctgtttttacgtaggtgtcagctgatcgctagggtatataacttcgtatagcatacattatacgaagttatttagggataacagggtaatggccggccataaaacgtcattttcccacggccgcgccgccccttttaaccgttaaccccacagccaatcaccacacggcccacactttttaaaatcacctcatttacatattggcaccattccatctataaggtatattatatagatag

SEQ ID NO: 59 - DNA, 580 bp, synthetic construct; identical to SEQ ID NO: 40
  misc_feature 1..580: note = Synthetic
  source 1..580: mol_type = other DNA

SEQ ID NO: 60 - DNA, 580 bp, synthetic construct
  misc_feature 1..580: note = Synthetic
  source 1..580: mol_type = other DNA
ggccggccgggtggagtttttttgcaataacttcgtatagcatacattatacgaagttatagttgtcgcgggaaatgttacgcataaaaaggcttcttttctcacggaactacttagttttcccacggtatttaacaggaaatgaggtagttttgaccggatgcaagtgaaaattgctgattttcgcgcgaaaactgaatgaggaagtgtttttctgaataatgtggtatttatggcagggtggagtatttgttcagggccaggtagactttgacccattacgtggaggtttcgattaccgtgttttttacctgaatttccgcgtaccgtgtcaaagtcttctgtttttacgtaggtgtcagctgatcgctagggtatttagggataacagggtaatataacttcgtatagcatacattatacgaagttatggccggccataaaacgtcattttcccacggccgcgccgccccttttaaccgttaaccccacagccaatcaccacacggcccacactttttaaaatcacctcatttacatattggcaccattccatctataaggtatattatatagatag

SEQ ID NO: 61 - protein, 319 aa, Human adenovirus
  REGION 1..319: note = misc_feature - Human adenovirus 3, NCBI Accession No. YP_002213796
MAKRARLSTSFNPVYPYEDESSSQHPFINPGFISPDGFTQSPNGVLSLKCVNPLTTASGSLQLKVGSGLTVDTTDGSLEENIKVNTPLTKSNHSINLPIGNGLQIEQNKLCSKLGNGLTFDSSNSIALKNNTLWTGPKPEANCIIEYGKQNPDSKLTLILVKNGGIVNGYVTLMGASDYVNTLFKNKNVSINVELYFDATGHILPDSSSLKTDLELKYKQTADFSARGFMPSTTAYPFVLPNAGTHNENYIFGQCYYKASDGALFPLEVTVMLNKRLPDSRTSYVMTFLWSLNAGLAPETTQATLITSPFTFSYIREDD

SEQ ID NO: 62 - protein, 544 aa, Human adenovirus
  REGION 1..544: note = misc_feature - Human adenovirus 3, NCBI Accession No. YP_002213774
MRRRAVLGGAVVYPEGPPPSYESVMQQQAAMIQPPLEAPFVPPRYLAPTEGRNSIRYSELSPLYDTTKLYLVDNKSADIASLNYQNDHSNFLTTVVQNNDFTPTEASTQTINFDERSRWGGQLKTIMHTNMPNVNEYMFSNKFKARVMVSRKAPEGVTVNDTYDHKEDILKYEWFEFILPEGNFSATMTIDLMNNAIIDNYLEIGRQNGVLESDIGVKFDTRNFRLGWDPETKLIMPGVYTYEAFHPDIVLLPGCGVDFTESRLSNLLGIRKRHPFQEGFKIMYEDLEGGNIPALLDVTAYEESKKDTTTETTTLAVAEETSEDDDITRGDTYITEKQKREAAAAEVKKELKIQPLEKDSKSRSYNVLEDKINTAYRSWYLSYNYGNPEKGIRSWTLLTTSDVTCGAEQVYWSLPDMMQDPVTFRSTRQVNNYPVVGAELMPVFSKSFYNEQAVYSQQLRQATSLTHVFNRFPENQILIRPPAPTITTVSENVPALTDHGTLPLRSSIRGVQRVTVTDARRRTCPYVYKALGIVAPRVLSSRTF

SEQ ID NO: 63 - protein, 944 aa, Human adenovirus
  REGION 1..944: note = misc_feature - Human adenovirus 3, NCBI Accession No. YP_002213779
MATPSMMPQWAYMHIAGQDASEYLSPGLVQFARATDTYFSMGNKFRNPTVAPTHDVTTDRSQRLMLRFVPVDREDNTYSYKVRYTLAVGDNRVLDMASTFFDIRGVLDRGPSFKPYSGTAYNSLAPKGAPNTSQWIVTTNGDNAVTTTTNTFGIASMKGDNITKEGLQIGKDITTTEGEEKPIYADKTYQPEPQVGEESWTDTDGTNEKFGGRALKPATNMKPCYGSFARPTNIKGGQAKNRKVKPTTEGGVETEEPDIDMEFFDGRDAVAGALAPEIVLYTENVNLETPDSHVVYKPETSNNSHANLGQQAMPNRPNYIGFRDNFVGLMYYNSTGNMGVLAGQASQLNAVVDLQDRNTELSYQLLLDSLGDRTRYFSMWNQAVDSYDPDVRIIENHGIEDELPNYCFPLNGIGPGHTYQGIKVKTDDTNGWEKDANVAPANEITIGNNLAMEINIQANLWRSFLYSNVALYLPDVYKYTPPNITLPTNTNTYEYMNGRVVSPSLVDSYINIGARWSLDPMDNVNPFNHHRNAGLRYRSMLLGNGRYVPFHIQVPQKFFAVKNLLLLPGSYTYEWNFRKDVNMVLQSSLGNDLRTDGATISFTSINLYATFFPMAHNTASTLEAMLRNDTNDQSFNDYLSAANMLYPIPANATNIPISIPSRNWAAFRGWSFTRLKTKETPSLGSGFDPYFVYSGSIPYLDGTFYLNHTFKKVSIMFDSSVSWPGNDRLLSPNEFEIKRTVDGEGYNVAQCNMTKDWFLVQMLANYNIGYQGFYIPEGYKDRMYSFFRNFQPMSRQVVDEVNYTDYKAVTLPYQHNNSGFVGYLAPTMRQGEPYPANYPYPLIGTTAVKSVTQKKFLCDRTMWRIPFSSNFMSMGALTDLGQNMLYANSAHALDMTFEVDPMDEPTLLYLLFEVFDVVRVHQPHRGVIEAVYLRTPFSAGNATT

SEQ ID NO: 64 - protein, 325 aa, Human adenovirus
  REGION 1..325: note = misc_feature - Human adenovirus 7, GenBank Accession No. AP_000564
MTKRVRLSDSFNPVYPYEDESTSQHPFINPGFISPNGFTQSPDGVLTLKCLTPLTTTGGSLQLKVGGGLTIDDTDGFLKENISATTPLVKTGHSIGLSLGPGLGTNENKLCAKLGEGLTFNSNNICINDNINTLWTGVNPTRANCQIMASSESNDCKLILTLVKTGALVTAFVYVIGVSNDFNMLTTHKNINFTAELFFDSTGNLLTSLSSLKTPLNHKSGQNMATGALTNAKGFMPSTTAYPFNVNSREKENYIYGTCYYTASDHTAFPIDISVMLNQRALNNETSYCIRVTWSWNTGVAPEVQTSATTLVTSPFTFYYIREDD

SEQ ID NO: 65 - protein, 544 aa, Human adenovirus
  REGION 1..544: note = misc_feature - Human adenovirus 7, GenBank Accession No. AP_000543
MRRRAVLGGAVVYPEGPPPSYESVMQQQAAMIQPPLEVPFVPPRYLAPTEGRNSIRYSELSPLYDTTKLYLVDNKSADIASLNYQNDHSNFLTTVVQNNDFTPTEASTQTINFDERSRWGGHLKTIMHTNMPNVNEYMFSNKFKARVMVSRKAPEGVTVNDTYDHKEDILKYEWFEFILPEGNFSATMTIDLMNNAIIDNYLEIGRQNGVLESDIGVKFDTRNFRLGWDPETKLIMPGVYTYEAFHPDIVLLPGCGVDFTESRLSNLLGIRKRHPFQEGFKIMYEDLEGGNIPALLDVTAYEESKKDTTTETTTLAVAEETSEDDNITRGDTYITEKHKREAAAAEVKKELKIQPLEKDSKSRSYNVLEDKINTAYRSWYLSYNYGNPKKGIRSWTLLTTSDVTCGAEQVYWSLPDMMQDPVTFRSTRQVNNYPVVGAELMPVFSKSFYNEQAVYSQQLRQATSLTHVFNRFPENQILIRPPAPTITTVSENVPALTDHGTLPLRSSIRGVQRVTVTDARRRTCPYVYKALGIVAPRVLSSRTF

SEQ ID NO: 66 - protein, 934 aa, Human adenovirus
  REGION 1..934: note = misc_feature - Human adenovirus 7, GenBank Accession No. AP_000548
MATPSMMPQWAYMHIAGQDASEYLSPGLVQFARATDTYFSMGNKFRNPTVAPTHDVTTDRSQRLMLRFVPVDREDNTYSYKVRYTLAVGDNRVLDMASTFFDIRGVLDRGPSFKPYSGTAYNSLAPKGAPNTSQWIVTTGEDNATTYTFGIASTKGDNITKEGLEIGKDITADNKPIYADKTYQPEPQVGEESWTDIDGTNEKFGGRALKPATKMKPCYGSFARPTNIKGGQAKNRKVTPTEGDVEAEEPDIDMEFFDGREAADAFSPEIVLYTENVNLETPDSHVVYKPGTSDGNSHANLGQQAMPNRPNYIGFRDNFVGLMYYNSTGNMGVLAGQASQLNAVVDLQDRNTELSYQLLLDSLGDRSRYFSMWNQAVDSYDPDVRIIENHGVEDELPNYCFPLDGIGPGNKYQGIKPRDTAWEKDTKVSTANEIAIGNNLAMEINIQANLWRSFLYSNVALYLPDVYKYTPTNITLPANTNTYEYMNGRVVSPSLVDSYINIGARWSLDPMDNVNPFNHHRNAGLRYRSMLLGNGRYVPFHIQVPQKFFAVKNLLLLPGSYTYEWNFRKDVNMVLQSSLGNDLRTDGANISFTSINLYATFFPMAHNTASTLEAMLRNDTNDQSFNDYLSAANMLYPIPANATNIPISIPSRNWAAFRGWSFTRLKTKETPSLGSGFDPYFVYSGSIPYLDGTFYLNHTFKKVSIMFDSSVSWPGNDRLLSPNEFEIKRTVDGEGYNVAQCNMTKDWFLVQMLANYNIGYQGFYIPEGYKDRMYSFFRNFQPMSRQVVDEVNYTDYKAVTLPYQHNNSGFVGYLAPTMRQGEPYPANYPYPLIGTTAVKSVTQKKFLCDRTMWRIPFSSNFMSMGALTDLGQNLLYANSAHALDMTFEVDPMDEPTLLYLLFEVFDVVRVHQPHRGVIEAVYLRTPFSAGNATT

SEQ ID NO: 67 - protein, 325 aa, Human adenovirus
  REGION 1..325: note = misc_feature - Human adenovirus 11, GenBank Accession No. YP_002213828
MTKRVRLSDSFNPVYPYEDESTSQHPFINPGFISPNGFTQSPNGVLTLKCLTPLTTTGGSLQLKVGGGLTVDDTNGFLKENISATTPLVKTGHSIGLPLGAGLGTNENKLCIKLGQGLTFNSNNICIDDNINTLWTGVNPTEANCQIMNSSESNDCKLILTLVKTGALVTAFVYVIGVSNNFNMLTTHRNINFTAELFFDSTGNLLTRLSSLKTPLNHKSGQNMATGAITNAKGFMPSTTAYPFNDNSREKENYIYGTCYYTASDRTAFPIDISVMLNRRAINDETSYCIRITWSWNTGDAPEVQTSATTLVTSPFTFYYIREDD

SEQ ID NO: 68 - protein, 561 aa, Human adenovirus
  REGION 1..561: note = misc_feature - Human adenovirus 11, GenBank Accession No. YP_002213807
MRRVVLGGAVVYPEGPPPSYESVMQQQQATAVMQSPLEAPFVPPRYLAPTEGRNSIRYSELAPQYDTTRLYLVDNKSADIASLNYQNDHSNFLTTVVQNNDFTPTEASTQTINFDERSRWGGQLKTIMHTNMPNVNEYMFSNKFKARVMVSRKPPDGAAVGDTYDHKQDILKYEWFEFTLPEGNFSVTMTIDLMNNAIIDNYLKVGRQNGVLESDIGVKFDTRNFKLGWDPETKLIMPGVYTYEAFHPDIVLLPGCGVDFTESRLSNLLGIRKKQPFQEGFKILYEDLEGGNIPALLDVDAYENSKKEQKAKIEAATAAAEAKANIVASDSTRVANAGEVRGDNFAPTPVPTAESLLADVSEGTDVKLTIQPVEKDSKNRSYNVLEDKINTAYRSWYLSYNYGDPEKGVRSWTLLTTSDVTCGAEQVYWSLPDMMKDPVTFRSTRQVSNYPVVGAELMPVFSKSFYNEQAVYSQQLRQSTSLTHVFNRFPENQILIRPPAPTITTVSENVPALTDHGTLPLRSSIRGVQRVTVTDARRRTCPYVYKALGIVAPRVLSSRTF

SEQ ID NO: 69 - protein, 948 aa, Human adenovirus
  REGION 1..948: note = misc_feature - Human adenovirus 11, GenBank Accession No. YP_002213812
MATPSMLPQWAYMHIAGQDASEYLSPGLVQFARATDTYFNLGNKFRNPTVAPTHDVTTDRSQRLMLRFVPVDREDNTYSYKVRYTLAVGDNRVLDMASTFFDIRGVLDRGPSFKPYSGTAYNSLAPKGAPNTSQWIAEGVKNTTGEEHVTEEETNTTTYTFGNAPVKAEAEITKEGLPVGLEVSDEESKPIYADKTYQPEPQLGDETWTDLDGKTEKYGGRALKPDTKMKPCYGSFAKPTNVKGGQAKQKTTEQPNQKVEYDIDMEFFDAASQKTNLSPKIVMYAENVNLETPDTHVVYKPGTEDTSSEANLGQQSMPNRPNYIGFRDNFIGLMYYNSTGNMGVLAGQASQLNAVVDLQDRNTELSYQLLLDSLGDRTRYFSMWNQAVDSYDPDVRVIENHGVEDELPNYCFPLDGIGVPTTSYKSIVPNGDNAPNWKEPEVNGTSEIGQGNLFAMEINLQANLWRSFLYSNVALYLPDSYKYTPSNVTLPENKNTYDYMNGRVVPPSLVDTYVNIGARWSLDAMDNVNPFNHHRNAGLRYRSMLLGNGRYVPFHIQVPQKFFAVKNLLLLPGSYTYEWNFRKDVNMVLQSSLGNDLRVDGASISFTSINLYATFFPMAHNTASTLEAMLRNDTNDQSFNDYLSAANMLYPIPANATNIPISIPSRNWAAFRGWSFTRLKTKETPSLGSGFDPYFVYSGSIPYLDGTFYLNHTFKKVSIMFDSSVSWPGNDRLLSPNEFEIKRTVDGEGYNVAQCNMTKDWFLVQMLANYNIGYQGFYIPEGYKDRMYSFFRNFQPMSRQVVDEVNYKDFKAVAIPYQHNNSGFVGYMAPTMRQGQPYPANYPYPLIGTTAVNSVTQKKFLCDRTMWRIPFSSNFMSMGALTDLGQNMLYANSAHALDMTFEVDPMDEPTLLYLLFEVFDVVRVHQPHRGIIEAVYLRTPFSAGNATT

SEQ ID NO: 70 - protein, 325 aa, Human adenovirus
  REGION 1..325: note = misc_feature - Human adenovirus 14, GenBank Accession No. AAW33140
MTKRVRLSDSFNPVYPYEDESTSQHPFINPGFISPNGFTQSPDGVLTLKCLTPLTTTGGSLQLKVGGGLTVDDTDGTLQENIGATTPLVKTGHSIGLSLGAGLGTDENKLCTKLGEGLTFNSNNICIDDNINTLWTGVNPTEANCQMMDSSESNDCKLILTLVKTGALVTAFVYVIGVSNNFNMLTTYRNINFTAELFFDSAGNLLTSLSSLKTPLNHKSGQNMATGAITNAKSFMPSTTAYPFNNNSREKENYIYGTCHYTASDHTAFPIDISVMLNQRAIRADTSYCIRITWSWNTGDAPEGQTSATTLVTSPFTFYYIREDD

SEQ ID NO: 71 - protein, 558 aa, Human adenovirus
  REGION 1..558: note = misc_feature - Human adenovirus 14, GenBank Accession No. AAW33119
MRRVVLGGAVVYPEGPPPSYESVMQQQQATAVMQSPLEAPFVPPRYLAPTEGRNSIRYSELAPQYDTTRLYLVDNKSADIASLNYQNDHSNFLTTVVQNNDFTPTEASTQTINFDERSRWGGQLKTIMHTNMPNVNEYMFSNNFKARVMVSRKPPEGAAVGDTYDHKQDILEYEWFEFTLPEGNFSVTMTIDLMNNAIIDNYLKVGRQNGVLESDIGVKFDTRNFKLGWDPETKLIMPGVYTYEAFHPDIVLLPGCGVDFTESRLSNLLGIRKKQPFQEGFKILYEDLEGGNIPALLDVDAYENSKKEQKAKIEAAAEAKANIVASDFTRVANAGEVRGDNFAPTPVPTAESLLADVTGGTDVKLTIQPVEKDSKNRSYNVLEDKINTAYRSWYLSYNYGDPEKGVRSWTLLTTSDVTCGAEQVYWSLPDMMQDPVTFRSTRQVSNYPVVGAELMPVFSKSFYNEQAVYSQQLRQSTSLTHVFNRFPENQILIRPPAPTITTVSENVPALTDHGTLPLRSSIRGVQRVTVTDARRRTCPYVYKALGIVAPRVLSSRTF

SEQ ID NO: 72 - protein, 945 aa, Human adenovirus
  REGION 1..945: note = misc_feature - Human adenovirus 14, GenBank Accession No. AAW33124
MATPSMLPQWAYMHIAGQDASEYLSPGLVQFARATDTYFNLGNKFRNPTVAPTHDVTTDRSQRLMLRFVPVDREDNTYSYKVRYTLAVGDNRVLDMASTFFDIRGVLDRGPSFKPYSGTAYNSLAPKGAPNASQWLDKGVETTEERQNEDGENDEKATYTFGNAPVKADADITKDGLPIGLEVPAEGDPKPIYANKLYQPEPQVGQESWTDTDGTEEKYGGRVLKPDTKMKPCYGSFAKPTNVKGGQAKVKTEEGNNIEYDIDMNFFDLRSQKQGLKPKIVMYAENVDLESPDTHVVYKPEVSDASSNANLGQQSMPNRPNYIGFRDNFIGLMYYNSTGNMGVLAGQASQLNAVVDLQDRNTELSYQLLLDSLGDRTRYFSMWNQAVDSYDPDVRVIENHGVEDELPNYCFPLDGIGPRTDSYKEIQLNGDQAWKDVNPNGISELVKGNPFAMEINLQANLWRSFLYSNVALYLPDSYKYTPSNVTLPENKNTYDYMNGRVVPPSLVDTYVNIGARWSLDAMDNVNPFNHHRNAGLRYRSMLLGNGRYVPFHIQVPQKFFAVKNLLLLPGSYTYEWNFRKDVNMVLQSSLGNDLRVDGASISFTSINLYATFFPMAHNTASTLEAMLRNDTNDQSFNDYLSAANMLYPIPANATNIPISIPSRNWAAFRGWSFTRLKTKETPSLGSGFDPYFVYSGSIPYLDGTFYLNHTFKKVSIMFDSSVSWPGNDRLLSPNEFEIKRTVDGEGYNVAQCNMTKDWFLVQMLANYNIGYQGFYIPEGYKDRMYSFFRNFQPMSRQVVDEVNYKDFKAVAIPYQHNNSGFVGYMAPTMRQGQPYPANYPYPLIGTTAVNSVTQKKFLCDRTMWRIPFSSNFMSMGALTDLGQNMLYANSAHALDMTFEVDPMDEPTLLYLLFEVFDVVRVHQPHRGIIETVYLRTPFSAGNATT

SEQ ID NO: 73 - protein, 353 aa, Human adenovirus
  REGION 1..353: note = misc_feature - Human adenovirus 16, GenBank Accession No. AAW33461
MAKRARLSSSFNPVYPYEDESSSQHPFINPGFISSNGFAQSPDGVLTLKCVNPLTTASGPLQLKVGSSLTVDTIDGSLEENITAAAPLTKTNHSIGLLIGSGLQTKDDKLCLSLGDGLVTKDDKLCLSLGDGLITKNDVLCAKLGHGLVFDSSNAITIENNTLWTGAKPSANCVIKEGEDSPDCKLTLVLVKNGGLINGYITLMGASEYTNTLFKNNQVTIDVNLAFDNTGQIITYLSSLKSNLNFKDNQNMATGTITSAKGFMPSTTAYPFITYATETLNEDYIYGECYYKSTNGTLFPLKVTVTLNRRMLASGMAYAMNFSWSLNAEEAPETTEVTLITSPFFFSYIREDD

SEQ ID NO: 74 - protein, 555 aa, Human adenovirus
  REGION 1..555: note = misc_feature - Human adenovirus 16, GenBank Accession No. AAW33439
MRRRAVLGGAVVYPEGPPPSYESVMQQQAAMIQPPLEAPFVPPRYLAPTEGRNSIRYSELSPQYDTTKLYLVDNKSADIASLNYQNDHSNFLTTVVQNNDFTPTEASTQTINFDERSRWGGQLKTIMHTNMPNVNEYMFSNKFKARVMVSRKAPEGVTVNDHKDDILKYEWFEFTLPEGNFSATMTIDLMNNAIIDNYLKIGRQNGVLESDIGVKFDTRNFRLGWDPETKLIMPGVYTYEAFHPDIVLLPGCGVDFTESRLSNLLGIRKRHPFQEGFKIMYEDLEGGNIPALLDVTAYEESKKDTTTETGEKAVVKTTTVAVAEETSEDDNITRGDTYITEKQKREAAAAELLLMSEVKKELKIQPLEKDSKNRSYNVLEDKINTAYRSWYLSYNYGNPEKGIRSWTLLTTSDVTCGAEQVYWSLPDMMQDPITFRSSRQVNNYPVVGAELMPVFSKSFYNEQAVYSQQLRQSTSLTHVFNRFPENQILIRPPAPTITTISENVPALTDHGTLPLRSSIRGVQRVTVTDARRRTCPYVYKALGIVAPRVLSSRTF

SEQ ID NO: 75 - protein, 940 aa, Human adenovirus
  REGION 1..940: note = misc_feature - Human adenovirus 16, GenBank Accession No. AAW33444
MATPSMMPQWAYMHIAGQDASEYLSPGLVQFARATDTYFSMGNKFRNPTVAPTHDVTTDRSQRLMLRFVPVDREDNTYSYKVRYTLAVGDNRVLDMASTFFDIRGVLDRGPSFKPYSGTAYNSLAPKGAPNTCQWKDSDSKMHTFGVAAMPGVTGKKIEADGLPIGIDSTSGTDTVIYADKTFQPEPQVGNASWVDANGTEEKYGGRALKDTTKMKPCYGSFAKPTNKEGGQANLKDSETAATTPNYDIDLAFFDNKNIAANYDPDIVMYTENVDLQTPDTHIVYKPGTEDTSSESNLGQQAMPNRPNYIGFRDNFIGLMYYNSTGNMGVLAGQASQLNAVVDLQDRNTELSYQLLLDSLGDRTRYFSMWNQAVDSYDPDVRIIENHGVEDELPNYCFPLNGVGFTDTYQGVKVKTDAVAGTSGTQWDKDDTTVSTANEIHGGNPFAMEINIQANLWRSFLYSNVALYLPDSYKYTPSNVTLPENKNTYDYMNGRVVPPSLVDTYVNIGARWSLDAMDNVNPFNHHRNAGLRYRSMLLGNGRYVPFHIQVPQKFFAVKNLLLLPGSYTYEWNFRKDVNMVLQSSLGNDLRVDGASISFTSINLYATFFPMAHNTASTLEAMLRNDTNDQSFNDYLSAANMLYPIPANATNIPISIPSRNWAAFRGWSFTRLKTKETPSLGSGFDPYFVYSGSIPYLDGTFYLNHTFKKVSIMFDSSVSWPGNDRLLSPNEFEIKRTVDGEGYNVAQCNMTKDWFLVQMLANYNIGYQGFYIPEGYKDRMYSFFRNFQPMSRQVVDEVNYTDYKAVTLPYQHNNSGFVGYLAPTMRQGEPYPANYPYPLIGTTAVKSVTQKKFLCDRTMWRIPFSSNFMSMGALTDLGQNLLYANSAHALDMTFEVDPMDEPTLLYLLFEVFDVVRVHQPHRGVIEAVYLRTPFSAGNATT

SEQ ID NO: 76 - protein, 323 aa, Human adenovirus
  REGION 1..323: note = misc_feature - Human adenovirus 21, GenBank Accession No. AAW33370
MTKRVRLSDSFNPVYPYEDESTSQHPFINPGFISPNGFTQSPDGVLTLNCLTPLTTTGGPLQLKVGGGLIVDDTDGTLQENIRATAPITKNNHSVELSIGNGLETQNNKLCAKLGNGLKFNNGDICIKDSINTLWTGIKPPPNCQIVENTDTNDGKLTLVLVKNGGLVNGYVSLVGVSDTVNQMFTQKSATIQLRLYFDSSGNLLTDESNLKIPLKNKSSTATSEAATSSKAFMPSTTAYPFNTTTRDSENYIHGICYYMTSYDRSLVPLNISIMLNSRTISSNVAYAIQFEWNLNAKESPESNIATLTTSPFFFSYIREDDN

SEQ ID NO: 77 - protein, 561 aa, Human adenovirus
  REGION 1..561: note = misc_feature - Human adenovirus 21, GenBank Accession No. AAW33349
MMRRTVLGGAVVYPEGPPPSYESVMQQAAAATMQPPLEAPFVPPRYLAPTEGRNSIRYSELAPLYDTTRLYLVDNKSADIASLNYQNDHSNFLTTVVQNNDFTPTEASTQTINFDERSRWGGQLKTIMHTNMPNVNEYMFSNKFKARVMVSRKAPEGVTVDDNYDHKQDILEYEWFEFTLPEGNFSATMTIDLMNNAIIDNYLEVGRQNGVLESDIGVKFDTRNFRLGWDPETKLIMPGVYTYEAFHPDIVLLPGCGVDFTESRLSNLLGIRKRHPFQEGFKILYEDLEGGNIPALLDVEAYENSKKEQEAKTEAAKAAAIAKANIVVSDPVRVANAEEVRGDNYTASSVATDESLLAAVAETTETKLTIKPVEKDSKSRSYNVLEDKVNTAYRSWYLSYNYGDPEKGVRSWTLLTTSDVTCGAEQVYWSLPDMMQDPVTFRSTRQVSNYPVVGAELMPVFSKSFYNEQAVYSQQLRQSTSLTHVFNRFPENQILIRPPAPTITTVSENVPALTDHGTLPLRSSIRGVQRVTVTDARRRTCPYVYKALGIVAPRVLSSRTF

SEQ ID NO: 78 - protein, 949 aa, Human adenovirus
  REGION 1..949: note = misc_feature - Human adenovirus 21, GenBank Accession No. AAW33354
MATPSMLPQWAYMHIAGQDASEYLSPGLVQFARATDTYFNLGNKFRNPTVAPTHDVTTDRSQRLMLRFVPVDREDNTYAYKVRYTLAVGDNRVLDMASTFFDIRGVLDRGPSFKPYSGTAYNSLAPKGAPNTSQWIAEGVKKEDGGSDEEEEKNLTTYTFGNAPVKAEGGDITKDKGLPIGSEITDGEAKPIYADKLYQPEPQVGDETWTDTDGTTEKYGGRALKPETKMKPCYGSFAKPTNVKGGQAKQKTTEQPQNQQVEYDIDMNFFDEASQKANFSPKIVMYAENVDLETPDTHVVYKPGTSEESSHANLGQQSMPNRPNYIGFRDNFIGLMYYNSTGNMGVLAGQASQLNAVVDLQDRNTELSYQLLLDSLGDRTRYFSMWNQAVDSYDPDVRIIENHGVEDELPNYCFPLDGVGVPISSYKIIEPNGQGADWKEPDINGTSEIGQGNLFAMEINLQANLWRSFLYSNVALYLPDSYKYTPANVTLPTNTNTYDYMNGRVVPPSLVDTYVNIGARWSLDAMDNVNPFNHHRNAGLRYRSMLLGNGRYVPFHIQVPQKFFAVKNLLLLPGSYTYEWNFRKDVNMVLQSSLGNDLRVDGASISFTSINLYATFFPMAHNTASTLEAMLRNDTNDQSFNDYLSAANMLYPIPANATNVPISIPSRNWAAFRGWSFTRLKTKETPSLGSGFDPYFVYSGSIPYLDGTFYLNHTFKKVSIMFDSSVSWPGNDRLLSPNEFEIKRTVDGEGYNVAQCNMTKDWFLVQMLANYNIGYQGFYVPEGYKDRMYSFFRNFQPMSRQVVDEINYKDYKAVAVPYQHNNSGFVGYMAPTMRQGQAYPANYPYPLIGTTAVTSVTQKKFLCDRTMWRIPFSSNFMSMGALTDLGQNLLYANSAHALDMTFEVDPMDEPTLLYLLFEVFDVVRVHQPHRGVIEAVYLRTPFSAGNATT

SEQ ID NO: 79 - protein, 323 aa, Human adenovirus
  REGION 1..323: note = misc_feature - Human adenovirus 34, GenBank Accession No. AAW33501
MTKRVRLSDSFNPVYPYEDESTSQHPFINPGFISPNGFTQSPDGVLTLKCLTPLTTTGGSLQLKVGGGLTVDDTDGTLQENIRATAPITKNNHSVELSIGNGLETQNNKLCAKLGNGLKFNNGDICIKDSINTLWTGINPPPNCQIVENTNTNDGKLTLVLVKNGGLVNGYVSLVGVSDTVNQMFTQKTANIQLRLYFDSSGNLLTDESDLKIPLKNKSSTATSETVASSKAFMPSTTAYPFNTTTRDSENYIHGICYYMTSYDRSLFPLNISIMLNSRMISSNVAYAIQFEWNLNASESPESNIATLTTSPFFFSYITEDDN

SEQ ID NO: 80 - protein, 558 aa, Human adenovirus
  REGION 1..558: note = misc_feature - Human adenovirus 34, GenBank Accession No. ABC49791
MRRVVLGGAVVYPEGPPPSYESVMQQQQATAVMQSPLEAPFVPPRYLAPTEGRNSIRYSELAPQYDTTRLYLVDNKSADIASLNYQNDHSNFLTTVVQNNDFTPTEASTQTINFDERSRWGGQLKTIMHTNMPNVNEYMFSNKFKARVMVSRKPPEGVRVDDNYDHKQDILKYEWFEFTLPEGNFSVTMTIDLMNNAIIDNYLKVGRQNGVLESDIGVKFDTRNFKLGWDPETKLIMPGVYTYEAFHPDIVLLPGCGVDFTESRLSNLLGIRKKHPFQEGFKILYEDLEGGNIPALLDVDAYENSKKDQKAKIEAAAEAKANIVANDPVRVANASEIRGDSFAATSVPTKESLLDDVSQNIELKLTIKPVEKDGKNRSYNVLEDKINTAYRSWYLSYNYGDPEKGVRSWTLLTTSDVTCGAEQVYWSLPDMMQDPVTFRSTRQVSNYPVVGAELMPVFSKSFYNEQAVYSQQLRQSTSLTHVFNRFPENQILIRPPAPTITTVSENVPALTDHGTLPLRSSIRGVQRVTVTDARRRTCPYVYKALGIVAPRVLSSRTF

SEQ ID NO: 81 - protein, 951 aa, Human adenovirus
  REGION 1..951: note = misc_feature - Human adenovirus 34, GenBank Accession No. AAW33485
MATPSMLPQWAYMHIAGQDASEYLSPGLVQFARATDTYFNLGNKFRNPTVAPTHDVTTDRSQRLMLRFVPVDREDNTYSYKVRYTLAVGDNRVLDMASTFFDIRGVLDRGPSFKPYSGTAYNSLAPKGAPNASQWLDKGVTSTGLVDDGNTDDGEEAKKATYTFGNAPVKAEAEITKDGLPVGLEVSTEGPKPIYADKLYQPEPQVGDETWTDLDGKTEEYGGRVLKPETKMKPCYGSFAKPTNIKGGQAKVKPKEDDGTNNIEYDIDMNFFDLRSQRSELKPKIVMYAENVDLECPDTHVVYKPGVSDASSETNLGQQSMPNRPNYIGFRDNFIGLMYYNSTGNMGVLAGQASQLNAVVDLQDRNTELSYQLLLDSLGDRTRYFSMWNQAVDSYDPDVRVIENHGVEDELPNYCFPLDGVGPRTDSYKEIKPNGDQSTWTNVDPTGSSELAKGNPFAMEINLQANLWRSFLYSNVALYLPDSYKYTPSNVTLPENKNTYDYMNGRVVPPSLVDTYVNIGARWSLDAMDNVNPFNHHRNAGLRYRSMLLGNGRYVPFHIQVPQKFFAVKNLLLLPGSYTYEWNFRKDVNMVLQSSLGNDLRVDGASISFTSINLYATFFPMAHNTASTLEAMLRNDTNDQSFNDYLSAANMLYPIPANATNIPISIPSRNWAAFRGWSFTRLKTKETPSLGSGFDPYFVYSGSIPYLDGTFYLNHTFKKVSIMFDSSVSWPGNDRLLSPNEFEIKRTVDGEGYNVAQCNMTKDWFLVQMLANYNIGYQGFYIPEGYKDRMYSFFRNFQPMSRQVVDEVNYKDFKAVAIPYQHNNSGFVGYMAPTMRQGQPYPANYPYPLIGTTAVNSVTQKKFLCDRTMWRIPFSSNFMSMGALTDLGQNMLYANSAHALDMTFEVDPMDEPTLLYLLFEVFDVVRVHQPHRGIIEAVYLRTPFSAGNATT

SEQ ID NO: 82 - protein, 323 aa, Human adenovirus
  REGION 1..323: note = misc_feature - Human adenovirus 50, GenBank Accession No. AAW33547
MTKRVRLSDSFNPVYPYEDESTSQHPFINPGFISPNGFTQSPDGVLTLNCLTPLTTTGGPLQLKVGGGLIVDDTDGTLQENIRVTAPITKNNHSVELSIGNGLETQNNKLCAKLGNGLKFNNGDICIKDSINTLWTGIKPPPNCQIVENTDTNDGKLTLVLVKNGGLVNGYVSLVGVSDTVNQMFTQKSATIQLRLYFDSSGNLLTDESNLKIPLKNKSSTATSEAATSSKAFMPSTTAYPFNTTTRDSENYIHGICYYMTSYDRSLVPLNISIMLNSRTISSNVAYAIQFEWNLNAKESPESNIATLTTSPFFFSYIREDDN

SEQ ID NO: 83 - protein, 560 aa, Human adenovirus
  REGION 1..560: note = misc_feature - Human adenovirus 50, GenBank Accession No. AAW33525
MRRTVLGGAVVYPEGPPPSYESVMQQAAAAAMQPPLEAPFVPPRYLAPTEGRNSIRYSELAPLYDTTRLYLVDNKSADIASLNYQNDHSNFLTTVVQNNDFTPTEASTQTINFDERSRWGGQLKTIMHTNMPNVNEYMFSNKFKARVMVSRKAPEGVTVDDNYDHKQDILEYEWFEFTLPEGNFSATMTIDLMNNAIIDNYLEVGRQNGVLESDIGVKFDTRNFRLGWDPETKLIMPGVYTYEAFHPDIVLLPGCGVDFTESRLSNLLGIRKRHPFQEGFKILYEDLEGGNIPALLDVEAYKNSKKEREAKTEAAKAAAIAKANIVVSDPVRVANAEEVRGDNYTASSVATEESLLAAVAETTETKLTIKPVEKDSKSRSYNVLEDKVNTAYRSWYLSYNYGDPEKGVRSWTLLTTSDVTCGAEQVYWSLPDMMQDPVTFRSTRQVSNYPVVGAELMPVFSKSFYNEQAVYSQQLRQSTSLTHVFNRFPENQILIRPPAPTITTVSENVPALTDHGTLPLRSSIRGVQRVTVTDARRRTCPYVYKALGIVAPRVLSSRTF

SEQ ID NO: 84 - protein, 940 aa, Human adenovirus
  REGION 1..940: note = misc_feature - Human adenovirus 50, GenBank Accession No. AAW33530
MATPSMLPQWAYMHIAGQDASEYLSPGLVQFARATDTYFNLGNKFRNPTVAPTHDVTTDRSQRLMLRFVPVDREDNTYAYKVRYTLAVGDNRVLDMASTFFDIRGVLDRGPSFKPYSGTAYNSLAPKGAPNTSQWLNKGDEEDGEDDQQATYTFGNAPVKAEAEITKEGLPIGLEVPSEGGPKPIYADKLYQPEPQVGEESWTDTDGTDEKYGGRALKPETKMKPCYGSFAKPTNVKGGQAKVKKEEEGKVEYDIDMNFFDLRSQMTGLKPKIVMYAENVDLETPDTHVVYKPGASDASSHANLGQQSMPNRPNYIGFRDNFIGLMYYNSTGNMGVLAGQASQLNAVVDLQDRNTELSYQLLLDSLGDRTRYFSMWNQAVDSYDPDVRVIENHGVEDELPNYCFPLDGVGPRIDSYKGIETNGDETTTWKDLEPKGISEIAKGNPFAMEINLQANLWRSFLYSNVALYLPDSYKYTPANVTLPTNTNTYDYMNGRVVPPSLVDTYVNIGARWSLDAMDNVNPFNHHRNAGLRYRSMLLGNGRYVPFHIQVPQKFFAVKNLLLLPGSYTYEWNFRKDVNMVLQSSLGNDLRVDGASISFTSINLYATFFPMAHNTASTLEAMLRNDTNDQSFNDYLSAANMLYPIPANATNVPISIPSRNWAAFRGWSFTRLKTKETPSLGSGFDPYFVYSGSIPYLDGTFYLNHTFKKVSIMFDSSVSWPGNDRLLSPNEFEIKRTVDGEGYNVAQCNMTKDWFLVQMLANYNIGYQGFYVPEGYKDRMYSFFRNFQPMSRQVVDEINYKDYKAVAVPYQHNNSGFVGYMAPTMRQGQAYPANYPYPLIGTTAVTSVTQKKFLCDRTMWRIPFSSNFMSMGALTDLGQNLLYANSAHALDMTFEVDPMDEPTLLYLLFEVFDVVRVHQPHRGVIEAVYLRTPFSAGNATT

SEQ ID NO: 85 - protein, 323 aa, Human adenovirus
  REGION 1..323: note = misc_feature - Human adenovirus 35, NCBI Accession No. AP_000601
MTKRVRLSDSFNPVYPYEDESTSQHPFINPGFISPNGFTQSPDGVLTLKCLTPLTTTGGSLQLKVGGGLTVDDTDGTLQENIRATAPITKNNHSVELSIGNGLETQNNKLCAKLGNGLKFNNGDICIKDSINTLWTGINPPPNCQIVENTNTNDGKLTLVLVKNGGLVNGYVSLVGVSDTVNQMFTQKTANIQLRLYFDSSGNLLTEESDLKIPLKNKSSTATSETVASSKAFMPSTTAYPFNTTTRDSENYIHGICYYMTSYDRSLFPLNISIMLNSRMISSNVAYAIQFEWNLNASESPESNIATLTTSPFFFSYITEDDN

SEQ ID NO: 86 - protein, 561 aa, Human adenovirus
  REGION 1..561: note = misc_feature - Human adenovirus 35, NCBI Accession No. AP_000580
MRRVVLGGAVVYPEGPPPSYESVMQQQQATAVMQSPLEAPFVPPRYLAPTEGRNSIRYSELAPQYDTTRLYLVDNKSADIASLNYQNDHSNFLTTVVQNNDFTPTEASTQTINFDERSRWGGQLKTIMHTNMPNVNEYMFSNKFKARVMVSRKPPDGAAVGDTYDHKQDILEYEWFEFTLPEGNFSVTMTIDLMNNAIIDNYLKVGRQNGVLESDIGVKFDTRNFKLGWDPETKLIMPGVYTYEAFHPDIVLLPGCGVDFTESRLSNLLGIRKKQPFQEGFKILYEDLEGGNIPALLDVDAYENSKKEQKAKIEAATAAAEAKANIVASDSTRVANAGEVRGDNFAPTPVPTAESLLADVSEGTDVKLTIQPVEKDSKNRSYNVLEDKINTAYRSWYLSYNYGDPEKGVRSWTLLTTSDVTCGAEQVYWSLPDMMKDPVTFRSTRQVSNYPVVGAELMPVFSKSFYNEQAVYSQQLRQSTSLTHVFNRFPENQILIRPPAPTITTVSENVPALTDHGTLPLRSSIRGVQRVTVTDARRRTCPYVYKALGIVAPRVLSSRTF

SEQ ID NO: 87 - protein, 952 aa, Human adenovirus
  REGION 1..952: note = misc_feature - Human adenovirus 35, NCBI Accession No. AP_000585
MATPSMLPQWAYMHIAGQDASEYLSPGLVQFARATDTYFNLGNKFRNPTVAPTHDVTTDRSQRLMLRFVPVDREDNTYSYKVRYTLAVGDNRVLDMASTFFDIRGVLDRGPSFKPYSGTAYNSLAPKGAPNASQWIAKGVPTAAAAGNGEEEHETEEKTATYTFANAPVKAEAQITKEGLPIGLEISAENESKPIYADKLYQPEPQVGDETWTDLDGKTEEYGGRALKPTTNMKPCYGSYAKPTNLKGGQAKPKNSEPSSEKIEYDIDMEFFDNSSQRTNFSPKIVMYAENVGLETPDTHVVYKPGTEDTSSEANLGQQSMPNRPNYIGFRDNFIGLMYYNSTGNMGVLAGQASQLNAVVDLQDRNTELSYQLLLDSLGDRTRYFSMWNQAVDSYDPDVRVIENHGVEDELPNYCFPLDGIGVPTTSYKSIVPNGEDNNNWKEPEVNGTSEIGQGNLFAMEINLQANLWRSFLYSNVALYLPDSYKYTPSNVTLPENKNTYDYMNGRVVPPSLVDTYVNIGARWSLDAMDNVNPFNHHRNAGLRYRSMLLGNGRYVPFHIQVPQKFFAVKNLLLLPGSYTYEWNFRKDVNMVLQSSLGNDLRVDGASISFTSINLYATFFPMAHNTASTLEAMLRNDTNDQSFNDYLSAANMLYPIPANATNIPISIPSRNWAAFRGWSFTRLKTKETPSLGSGFDPYFVYSGSIPYLDGTFYLNHTFKKVSIMFDSSVSWPGNDRLLSPNEFEIKRTVDGEGYNVAQCNMTKDWFLVQMLANYNIGYQGFYIPEGYKDRMYSFFRNFQPMSRQVVDEVNYKDFKAVAIPYQHNNSGFVGYMAPTMRQGQPYPANYPYPLIGTTAVNSVTQKKFLCDRTMWRIPFSSNFMSMGALTDLGQNMLYANSAHALDMTFEVDPMDEPTLLYLLFEVFDVVRVHQPHRGIIEAVYLRTPFSAGNATT

SEQ ID NO: 88 - DNA, 34794 bp, Human adenovirus
  misc_feature 1..34794: note = Human adenovirus 35, GenBank Accession No. AY271307
  source 1..34794: mol_type = genomic DNA
catcatcaataatataccttatagatggaatggtgccaatatgtaaatgaggtgattttaaaaagtgtgggccgtgtggtgattggctgtggggttaacggttaaaaggggcggcgcggccgtgggaaaatgacgttttatgggggtggagtttttttgcaagttgtcgcgggaaatgttacgcataaaaaggcttcttttctcacggaactacttagttttcccacggtatttaacaggaaatgaggtagttttgaccggatgcaagtgaaaattgctgattttcgcgcgaaaactgaatgaggaagtgtttttctgaataatgtggtatttatggcagggtggagtatttgttcagggccaggtagactttgacccattacgtggaggtttcgattaccgtgttttttacctgaatttccgcgtaccgtgtcaaagtcttctgtttttacgtaggtgtcagctgatcgctagggtatttatacctcagggtttgtgtcaagaggccactcttgagtgccagcgagaagagttttctcctctgcgccggcagtttaataataaaaaaatgagagatttgcgatttctgcctcaggaaataatctctgctgagactggaaatgaaatattggagcttgtggtgcacgccctgatgggagacgatccggagccacctgtgcagctttttgagcctcctacgcttcaggaactgtatgatttagaggtagagggatcggaggattctaatgaggaagctgtgaatggcttttttaccgattctatgcttttagctgctaatgaaggattagaattagatccgcctttggacactttcaatactccaggggtgattgtggaaagcggtacaggtgtaagaaaattacctgatttgagttccgtggactgtgatttgcactgctatgaagacgggtttcctccgagtgatgaggaggaccatgaaaaggagcagtccatgcagactgcagcgggtgagggagtgaaggctgccaatgttggttttcagttggattgcccggagcttcctggacatggctgtaagtcttgtgaatttcacaggaaaaatactggagtaaaggaactgttatgttcgctttgttatatgagaacgcactgccactttatttacagtaagtgtgtttaagttaaaatttaaaggaatatgctgtttttcacatgtatattgagtgtgagttttgtgcttcttattataggtcctgtgtctgatgctgatgaatcaccatctcctgattctactacctcacctcctgatattcaagcacctgttcctgtggacgtgcgcaagcccattcctgtgaagcttaagcctgggaaacgtccagcagtggagaaacttgaggacttgttacagggtggggacggacctttggacttgagtacacggaaacgtccaagacaataagtgttccatatccgtgtttacttaaggtgacgtcaatatttgtgtgagagtgcaatgtaataaaaatatgttaactgttcactggtttttattgctttttgggcggggactcaggtatataagtagaagcagacctgtgtggttagctcataggagctggctttcatccatggaggtttgggccattttggaagaccttaggaagactaggcaactgttagagagcgcttcggacggagtctccggtttttggagattctggttcgctagtgaattagctagggtagtttttaggataaaacaggactataaacaagaatttgaaaagttgttggtagattgcccaggactttttgaagctcttaatttgggccatcaggttcactttaaagaaaaagttttatcagttttagacttttcaaccccaggtagaactgctgctgctgtggcttttcttacttttatattagataaatggatcccgcagactcatttcagcaggggatacgttttggatttcatagccacagcattgtggagaacatggaaggttcgcaagatgaggacaatcttaggttactggccagtgcagcctttgggtgtagcgggaatcctgaggcatccaccggtcatgccagcggttctggaggaggaacagcaagaggacaacccgagagccggcctggaccctccagtggaggaggcggagtagctgacttgtctcctgaactgcaacgggtgcttactggatctacgtccactggacgggataggggcgttaagagggagagggcatccagtggtactgatgctagatctgagttggctttaagtttaatgagtcgcagacgtcctgaaaccatttggtggcatgaggttcagaaagagggaagggatgaagtttctgtattgcaggagaaatattcactggaacaggtgaaaacatgttggttggagccagaggatgattgggcggtggccattaaaaattatgccaagatagctttgaggcctgataaacagtataagatcagtagacggattaatatccggaatgcttgttacatatctggaaatggggctgaggtggtaatagatactcaagacaagacagttattagatgctgcatgatggatatgtggcctggagtagtcggtatggaagcagtcacttttgtaaatgttaagtttaggggagatggttataatggaatagtgtttatggccaataccaaacttatattgcatggttgtagcttttttggtttcaacaatacctgtgtagatgcctggggacaggttagtgtacgggggtgtagtttctatgcgtgttggattgccacagctggcagaaccaagagtcaattgtctctgaagaaatgcatattccaaagatgtaacctgggcattctgaatgaaggcgaagcaagggtccgtcactgcgcttctacagatactggatgttttattttaattaagggaaatgccagcgtaaagcataacatgatttgtggtgcttccgatgagaggccttatcaaatgctcacttgtgctggtgggcattgtaatatgctggctactgtgcatattgtttcccatcaacgcaaaaaatggcctgtttttgatcacaatgtgttgaccaagtgcaccatgcatgcaggtgggcgtagaggaatgtttatgccttaccagtgtaacatgaatcatgtgaaagtgttgttggaaccagatgccttttccagaatgagcctaacaggaatctttgacatgaacacgcaaatctggaagatcctgaggtatgatgatacgagatcgagggtgcgcgcatgcgaatgcggaggcaagcatgccaggttccagccggtgtgtgtagatgtgaccgaagatctcagaccggatcatttggttattgcccgcactggagcagagttcggatccagtggagaagaaactgactaaggtgagtattgggaaaactttggggtgggattttcagatggacagattgagtaaaaatttgttttttctgtcttgcagctgacatgagtggaaatgcttcttttaaggggggagtcttcagcccttatctgacagggcgtctcccatcctgggcaggagttcgtcagaatgttatgggatctactgtggatggaagacccgttcaacccgccaattcttcaacgctgacctatgctactttaagttcttcacctttggacgcagctgcagccgctgccgccgcctctgtcgccgctaacactgtgcttggaatgggttactatggaagcatcgtggctaattccacttcctctaataacccttctacactgactcaggacaagttacttgtccttttggcccagctggaggctttgacccaacgtctgggtgaactttctcagcaggtggccgagttgcgagtacaaactgagtctgctgtcggcacggcaaagtctaaataaaaaaaattccagaatcaatgaataaataaacgagcttgttgttgatttaaaatcaagtgtttttatttcatttttcgcgcacggtatgccctggaccaccgatctcgatcattgagaactcggtggattttttccagaatcctatagaggtgggattgaatgtttagatacatgggcattaggccgtctttggggtggagatagctccattgaagggattcatgctccggggtagtgttgtaaatcacccagtcataacaaggtcgcagtgcatggtgttgcacaatatcttttagaagtaggctgattgccacagataagcccttggtgtaggtgtttacaaaccggttgagctgggaggggtgcattcgaggtgaaattatgtgcattttggattggatttttaagttggcaatattgccgccaagatcccgtcttgggttcatgttatgaaggactaccaagacggtgtatccggtacatttaggaaatttatcgtgcagcttggatggaaaagcgtggaaaaatttggagacacccttgtgtcctccgagattttccatgcactcatccatgataatagcaatggggccgtgggcagcggcgcgggcaaacacgttccgtgggtctgacacatcatagttatgttcctgagttaaatcatcataagccattttaatgaatttggggcggagcgtaccagattggggtatgaatgttccttcgggccccggagcatagttcccctcacagatttgcatttcccaagctttcagttctgagggtggaatcatgtccacctggggggctatgaagaacaccgtttcgggggcgggggtgattagttgggatgatagcaagtttctgagcaattgagatttgccacatccggtggggccataaataattccgattacaggttgcaggtggtagtttagggaacggcaactgccgtcttctcgaagcaagggggccacctcgttcatcatttcccttacatgcatattttcccgcaccaaatccattaggaggcgctctcctcctagtgatagaagttcttgtagtgaggaaaagtttttcagcggttttagaccgtcagccatgggcattttggaaagagtttgctgcaaaagttctagtctgttccacagttcagtgatgtgttctatggcatctcgatccagcagacctcctcgtttcgcgggtttggacggctcctggagtagggtatgagacgatgggcgtccagcgctgccagggttcggtccttccagggtctcagtgttcgagtcagggttgtttccgtcacagtgaaggggtgtgcgcctgcttgggcgcttgccagggtgcgcttcagactcattctgctggtggagaacttctgtcgcttggcgccctgtatgtcggccaagtagcagtttaccatgagttcgtagttgagcgcctcggctgcgtggcctttggcgcggagcttacctttggaagttttcttgcataccgggcagtataggcatttcagcgcatacagcttgggcgcaaggaaaatggattctggggagtatgcatccgcgccgcaggaggcgcaaacagtttcacattccaccagccaggttaaatccggttcattggggtcaaaaacaagttttccgccatattttttgatgcgtttcttacctttggtctccataagttcgtgtcctcgttgagtgacaaacaggctgtccgtatctccgtagactgattttacaggcctcttctccagtggagtgcctcggtcttcttcgtacaggaactctgaccactctgatacaaaggcgcgcgtccaggccagcacaaaggaggctatgtgggaggggtagcgatcgttgtcaaccagggggtccaccttttccaaagtatgcaaacacatgtcaccctcttcaacatccaggaatgtgattggcttgtaggtgtatttcacgtgacctggggtccccgctgggggggtataaaagggggcggttctttgctcttcctcactgtcttccggatcgctgtccaggaacgtcagctgttggggtaggtattccctctcgaaggcgggcatgacctctgcactcaggttgtcagtttctaagaacgaggaggatttgatattgacagtgccggttgagatgcctttcatgaggttttcgtccatttggtcagaaaacacaatttttttattgtcaagtttggtggcaaatgatccatacagggcgttggataaaagtttggcaatggatcgcatggtttggttcttttccttgtccgcgcgctctttggcggcgatgttgagttggacatactcgcgtgccaggcacttccattcggggaagatagttgttaattcatctggcacgattctcacttgccaccctcgattatgcaaggtaattaaatccacactggtggccacctcgcctcgaaggggttcattggtccaacagagcctacctcctttcctagaacagaaagggggaagtgggtctagcataagttcatcgggagggtctgcatccatggtaaagattcccggaagtaaatccttatcaaaatagctgatgggagtggggtcatctaaggccatttgccattctcgagctgccagtgcgcgctcatatgggttaaggggactgccccagggcatgggatgggtgagagcagaggcatacatgccacagatgtcatagacgtagatgggatcctcaaagatgcctatgtaggttggatagcatcgcccccctctgatacttgctcgcacatagtcatatagttcatgtgatggcgctagcagccccggacccaagttggtgcgattgggtttttctgttctgtagacgatctggcgaaagatggcgtgagaattggaagagatggtgggtctttgaaaaatgttgaaatgggcatgaggtagacctacagagtctctgacaaagtgggcataagattcttgaagcttggttaccagttcggcggtgacaagtacgtctagggcgcagtagtcaagtgtttcttgaatgatgtcataacctggttggtttttcttttcccacagttcgcggttgagaaggtattcttcgcgatccttccagtactcttctagcggaaacccgtctttgtctgcacggtaagatcctagcatgtagaactgattaactgccttgtaagggcagcagcccttctctacgggtagagagtatgcttgagcagcttttcgtagcgaagcgtgagtaagggcaaaggtgtctctgaccatgactttgagaaattggtatttgaagtccatgtcgtcacaggctccctgttcccagagttggaagtctacccgtttcttgtaggcggggttgggcaaagcgaaagtaacatcattgaagagaatcttaccggctctgggcataaaattgcgagtgatgcggaaaggctgtggtacttccgctcgattgttgatcacctgggcagctaggacgatttcgtcgaaaccgttgatgttgtgtcctacgatgtataattctatgaaacgcggcgtgcctctgacgtgaggtagcttactgagctcatcaaaggttaggtctgtggggtcagataaggcgtagtgttcgagagcccattcgtgcaggtgaggatttgcatgtaggaatgatgaccaaagatctaccgccagtgctgtttgtaactggtcccgatactgacgaaaatgccggccaattgccattttttctggagtgacacagtagaaggttctggggtcttgttgccatcgatcccacttgagtttaatggctagatcgtgggccatgttgacgagacgctcttctcctgagagtttcatgaccagcatgaaaggaactagttgtttgccaaaggatcccatccaggtgtaagtttccacatcgtaggtcaggaagagtctttctgtgcgaggatgagagccgatcgggaagaactggatttcctgccaccagttggaggattggctgttgatgtgatggaagtagaagtttctgcggcgcgccgagcattcgtgtttgtgcttgtacagacggccgcagtagtcgcagcgttgcacgggttgtatctcgtgaatgagctgtacctggcttcccttgacgagaaatttcagtgggaagccgaggcctggcgattgtatctcgtgctcttctatattcgctgtatcggcctgttcatcttctgtttcgatggtggtcatgctgacgagcccccgcgggaggcaagtccagacctcggcgcgggaggggcggagctgaaggacgagagcgcgcaggctggagctgtccagagtcctgagacgctgcggactcaggttagtaggtagggacagaagattaacttgcatgatcttttccagggcgtgcgggaggttcagatggtacttgatttccacaggttcgtttgtagagacgtcaatggcttgcagggttccgtgtcctttgggcgccactaccgtacctttgttttttcttttgatcggtggtggctctcttgcttcttgcatgctcagaagcggtgacggggacgcgcgccgggcggcagcggttgttccggacccgggggcatggctggtagtggcacgtcggcgccgcgcacgggcaggttctggtattgcgctctgagaagacttgcgtgcgccaccacgcgtcgattgacgtcttgtatctgacgtctctgggtgaaagctaccggccccgtgagcttgaacctgaaagagagttcaacagaatcaatttcggtatcgttaacggcagcttgtctcagtatttcttgtacgtcaccagagttgtcctggtaggcgatctccgccatgaactgctcgatttcttcctcctgaagatctccgcgacccgctctttcgacggtggccgcgaggtcattggagatacggcccatgagttgggagaatgcattcatgcccgcctcgttccagacgcggctgtaaaccacggccccctcggagtctcttgcgcgcatcaccacctgagcgaggttaagctccacgtgtctggtgaagaccgcatagttgcataggcgctgaaaaaggtagttgagtgtggtggcaatgtgttcggcgacgaagaaatacatgatccatcgtctcagcggcatttcgctaacatcgcccagagcttccaagcgctccatggcctcgtagaagtccacggcaaaattaaaaaactgggagtttcgcgcggacacggtcaattcctcctcgagaagacggatgagttcggctatggtggcccgtacttcgcgttcgaaggctcccgggatctcttcttcctcttctatctcttcttccactaacatctcttcttcgtcttcaggcgggggcggagggggcacgcggcgacgtcgacggcgcacgggcaaacggtcgatgaatcgttcaatgacctctccgcggcggcggcgcatggtttcagtgacggcgcggccgttctcgcgcggtcgcagagtaaaaacaccgccgcgcatctccttaaagtggtgactgggaggttctccgtttgggagggagagggcgctgattatacattttattaattggcccgtagggactgcgcgcagagatctgatcgtgtcaagatccacgggatctgaaaacctttcgacgaaagcgtctaaccagtcacagtcacaaggtaggctgagtacggcttcttgtgggcgggggtggttatgtgttcggtctgggtcttctgtttcttcttcatctcgggaaggtgagacgatgctgctggtgatgaaattaaagtaggcagttctaagacggcggatggtggcgaggagcaccaggtctttgggtccggcttgctggatacgcaggcgattggccattccccaagcattatcctgacatctagcaagatctttgtagtagtcttgcatgagccgttctacgggcacttcttcctcacccgttctgccatgcatacgtgtgagtccaaatccgcgcattggttgtaccagtgccaagtcagctacgactctttcggcgaggatggcttgctgtacttgggtaagggtggcttgaaagtcatcaaaatccacaaagcggtggtaagcccctgtattaatggtgtaagcacagttggccatgactgaccagttaactgtctggtgaccagggcgcacgagctcggtgtatttaaggcgcgaataggcgcgggtgtcaaagatgtaatcgttgcaggtgcgcaccagatactggtaccctataagaaaatgcggcggtggttggcggtagagaggccatcgttctgtagctggagcgccaggggcgaggtcttccaacataaggcggtgatagccgtagatgtacctggacatccaggtgattcctgcggcggtagtagaagcccgaggaaactcgcgtacgcggttccaaatgttgcgtagcggcatgaagtagttcattgtaggcacggtttgaccagtgaggcgcgcgcagtcattgatgctctatagacacggagaaaatgaaagcgttcagcgactcgactccgtagcctggaggaacgtgaacgggttgggtcgcggtgtaccccggttcgagacttgtactcgagccggccggagccgcggctaacgtggtattggcactcccgtctcgacccagcctacaaaaatccaggatacggaatcgagtcgttttgctggtttccgaatggcagggaagtgagtcctattttttttttttttttgccgctcagatgcatcccgtgctgcgacagatgcgcccccaacaacagcccccctcgcagcagcagcagcagcaaccacaaaaggctgtccctgcaactactgcaactgccgccgtgagcggtgcgggacagcccgcctatgatctggacttggaagagggcgaaggactggcacgtctaggtgcgccttcgcccgagcggcatccgcgagttcaactgaaaaaagattctcgcgaggcgtatgtgccccaacagaacctatttagagacagaagcggcgaggagccggaggagatgcgagcttcccgctttaacgcgggtcgtgagctgcgtcacggtttggaccgaagacgagtgttgcgagacgaggatttcgaagttgatgaagtgacagggatcagtcctgccagggcacacgtggctgcagccaaccttgtatcggcttacgagcagacagtaaaggaagagcgtaacttccaaaagtcttttaataatcatgtgcgaaccctgattgcccgcgaagaagttacccttggtttgatgcatttgtgggatttgatggaagctatcattcagaaccctactagcaaacctctgaccgcccagctgtttctggtggtgcaacacagcagagacaatgaggctttcagagaggcgctgctgaacatcaccgaacccgaggggagatggttgtatgatcttatcaacattctacagagtatcatagtgcaggagcggagcctgggcctggccgagaaggtagctgccatcaattactcggttttgagcttgggaaaatattacgctcgcaaaatctacaagactccatacgttcccatagacaaggaggtgaagatagatgggttctacatgcgcatgacgctcaaggtcttgaccctgagcgatgatcttggggtgtatcgcaatgacagaatgcatcgcgcggttagcgccagcaggaggcgcgagttaagcgacagggaactgatgcacagtttgcaaagagctctgactggagctggaaccgagggtgagaattacttcgacatgggagctgacttgcagtggcagcctagtcgcagggctctgagcgccgcgacggcaggatgtgagcttccttacatagaagaggcggatgaaggcgaggaggaagagggcgagtacttggaagactgatggcacaacccgtgttttttgctagatggaacagcaagcaccggatcccgcaatgcgggcggcgctgcagagccagccgtccggcattaactcctcggacgattggacccaggccatgcaacgtatcatggcgttgacgactcgcaaccccgaagcctttagacagcaaccccaggccaaccgtctatcggccatcatggaagctgtagtgccttcccgatctaatcccactcatgagaaggtcctggccatcgtgaacgcgttggtggagaacaaagctattcgtccagatgaggccggactggtatacaacgctctcttagaacgcgtggctcgctacaacagtagcaatgtgcaaaccaatttggaccgtatgataacagatgtacgcgaagccgtgtctcagcgcgaaaggttccagcgtgatgccaacctgggttcgctggtggcgttaaatgctttcttgagtactcagcctgctaatgtgccgcgtggtcaacaggattatactaactttttaagtgctttgagactgatggtatcagaagtacctcagagcgaagtgtatcagtccggtcctgattacttctttcagactagcagacagggcttgcagacggtaaatctgagccaagcttttaaaaaccttaaaggtttgtggggagtgcatgccccggtaggagaaagagcaaccgtgtctagcttgttaactccgaactcccgcctgttattactgttggtagctcctttcaccgacagcggtagcatcgaccgtaattcctatttgggttacctactaaacctgtatcgcgaagccatagggcaaagtcaggtggacgagcagacctatcaagaaattacccaagtcagtcgcgctttgggacaggaagacactggcagtttggaagccactctgaacttcttgcttaccaatcggtctcaaaagatccctcctcaatatgctcttactgcggaggaggagaggatccttagatatgtgcagcagagcgtgggattgtttctgatgcaagagggggcaactccgactgcagcactggacatgacagcgcgaaatatggagcccagcatgtatgccagtaaccgacctttcattaacaaactgctggactacttgcacagagctgccgctatgaactctgattatttcaccaatgccatcttaaacccgcactggctgcccccacctggtttctacacgggcgaatatgacatgcccgaccctaatgacggatttctgtgggacgacgtggacagcgatgttttttcacctctttctgatcatcgcacgtggaaaaaggaaggcggtgatagaatgcattcttctgcatcgctgtccggggtcatgggtgctaccgcggctgagcccgagtctgcaagtccttttcctagtctacccttttctctacacagtgtacgtagcagcgaagtgggtagaataagtcgcccgagtttaatgggcgaagaggagtacctaaacgattccttgctcagaccggcaagagaaaaaaatttcccaaacaatggaatagaaagtttggtggataaaatgagtagatggaagacttatgctcaggatcacagagacgagcctgggatcatggggactacaagtagagcgagccgtagacgccagcgccatgacagacagaggggtcttgtgtgggacgatgaggattcggccgatgatagcagcgtgttggacttgggtgggagaggaaggggcaacccgtttgctcatttgcgccctcgcttgggtggtatgttgtgaaaaaaaataaaaaagaaaaactcaccaaggccatggcgacgagcgtacgttcgttcttctttattatctgtgtctagtataatgaggcgagtcgtgctaggcggagcggtggtgtatccggagggtcctcctccttcgtacgagagcgtgatgcagcagcagcaggcgacggcggtgatgcaatccccactggaggctccctttgtgcctccgcgatacctggcacctacggagggcagaaacagcattcgttactcggaactggcacctcagtacgataccaccaggttgtatctggtggacaacaagtcggcggacattgcttctctgaactatcagaatgaccacagcaacttcttgaccacggtggtgcagaacaatgactttacccctacggaagccagcacccagaccattaactttgatgaacgatcgcggtggggcggtcagctaaagaccatcatgcatactaacatgccaaacgtgaacgagtatatgtttagtaacaagttcaaagcgcgtgtgatggtgtccagaaaacctcccgacggtgctgcagttggggatacttatgatcacaagcaggatattttggaatatgagtggttcgagtttactttgccagaaggcaacttttcagttactatgactattgatttgatgaacaatgccatcatagataattacttgaaagtgggtagacagaatggagtgcttgaaagtgacattggtgttaagttcgacaccaggaacttcaagctgggatgggatcccgaaaccaagttgatcatgcctggagtgtatacgtatgaagccttccatcctgacattgtcttactgcctggctgcggagtggattttaccgagagtcgtttgagcaaccttcttggtatcagaaaaaaacagccatttcaagagggttttaagattttgtatgaagatttagaaggtggtaatattccggccctcttggatgtagatgcctatgagaacagtaagaaagaacaaaaagccaaaatagaagctgctacagctgctgcagaagctaaggcaaacatagttgccagcgactctacaagggttgctaacgctggagaggtcagaggagacaattttgcgccaacacctgttccgactgcagaatcattattggccgatgtgtctgaaggaacggacgtgaaactcactattcaacctgtagaaaaagatagtaagaatagaagctataatgtgttggaagacaaaatcaacacagcctatcgcagttggtatctttcgtacaattatggcgatcccgaaaaaggagtgcgttcctggacattgctcaccacctcagatgtcacctgcggagcagagcaggtttactggtcgcttccagacatgatgaaggatcctgtcactttccgctccactagacaagtcagtaactaccctgtggtgggtgcagagcttatgcccgtcttctcaaagagcttctacaacgaacaagctgtgtactcccagcagctccgccagtccacctcgcttacgcacgtcttcaaccgctttcctgagaaccagattttaatccgtccgccggcgcccaccattaccaccgtcagtgaaaacgttcctgctctcacagatcacgggaccctgccgttgcgcagcagtatccggggagtccaacgtgtgaccgttactgacgccagacgccgcacctgtccctacgtgtacaaggcactgggcatagtcgcaccgcgcgtcctttcaagccgcactttctaaaaaaaaaaaatgtccattcttatctcgcccagtaataacaccggttggggtctgcgcgctccaagcaagatgtacggaggcgcacgcaaacgttctacccaacatcccgtgcgtgttcgcggacattttcgcgctccatggggtgccctcaagggccgcactcgcgttcgaaccaccgtcgatgatgtaatcgatcaggtggttgccgacgcccgtaattatactcctactgcgcctacatctactgtggatgcagttattgacagtgtagtggctgacgctcgcaactatgctcgacgtaagagccggcgaaggcgcattgccagacgccaccgagctaccactgccatgcgagccgcaagagctctgctacgaagagctagacgcgtggggcgaagagccatgcttagggcggccagacgtgcagcttcgggcgccagcgccggcaggtcccgcaggcaagcagccgctgtcgcagcggcgactattgccgacatggcccaatcgcgaagaggcaatgtatactgggtgcgtgacgctgccaccggtcaacgtgtacccgtgcgcacccgtccccctcgcacttagaagatactgagcagtctccgatgttgtgtcccagcggcgaggatgtccaagcgcaaatacaaggaagaaatgctgcaggttatcgcacctgaagtctacggccaaccgttgaaggatgaaaaaaaaccccgcaaaatcaagcgggttaaaaaggacaaaaaagaagaggaagatggcgatgatgggctggcggagtttgtgcgcgagtttgccccacggcgacgcgtgcaatggcgtgggcgcaaagttcgacatgtgttgagacctggaacttcggtggtctttacacccggcgagcgttcaagcgctacttttaagcgttcctatgatgaggtgtacggggatgatgatattcttgagcaggcggctgaccgattaggcgagtttgcttatggcaagcgtagtagaataacttccaaggatgagacagtgtcaatacccttggatcatggaaatcccacccctagtcttaaaccggtcactttgcagcaagtgttacccgtaactccgcgaacaggtgttaaacgcgaaggtgaagatttgtatcccactatgcaactgatggtacccaaacgccagaagttggaggacgttttggagaaagtaaaagtggatccagatattcaacctgaggttaaagtgagacccattaagcaggtagcgcctggtctgggggtacaaactgtagacattaagattcccactgaaagtatggaagtgcaaactgaacccgcaaagcctactgccacctccactgaagtgcaaacggatccatggatgcccatgcctattacaactgacgccgccggtcccactcgaagatcccgacgaaagtacggtccagcaagtctgttgatgcccaattatgttgtacacccatctattattcctactcctggttaccgaggcactcgctactatcgcagccgaaacagtacctcccgccgtcgccgcaagacacctgcaaatcgcagtcgtcgccgtagacgcacaagcaaaccgactcccggcgccctggtgcggcaagtgtaccgcaatggtagtgcggaacctttgacactgccgcgtgcgcgttaccatccgagtatcatcacttaatcaatgttgccgctgcctccttgcagatatggccctcacttgtcgccttcgcgttcccatcactggttaccgaggaagaaactcgcgccgtagaagagggatgttgggacgcggaatgcgacgctacaggcgacggcgtgctatccgcaagcaattgcggggtggttttttaccagccttaattccaattatcgctgctgcaattggcgcgataccaggcatagcttccgtggcggttcaggcctcgcaacgacattgacattggaaaaaaaacgtataaataaaaaaaaatacaatggactctgacactcctggtcctgtgactatgttttcttagagatggaagacatcaatttttcatccttggctccgcgacacggcacgaagccgtacatgggcacctggagcgacatcggcacgagccaactgaacgggggcgccttcaattggagcagtatctggagcgggcttaaaaattttggctcaaccataaaaacatacgggaacaaagcttggaacagcagtacaggacaggcgcttagaaataaacttaaagaccagaacttccaacaaaaagtagtcgatgggatagcttccggcatcaatggagtggtagatttggctaaccaggctgtgcagaaaaagataaacagtcgtttggacccgccgccagcaaccccaggtgaaatgcaagtggaggaagaaattcctccgccagaaaaacgaggcgacaagcgtccgcgtcccgatttggaagagacgctggtgacgcgcgtagatgaaccgccttcttatgaggaagcaacgaagcttggaatgcccaccactagaccgatagccccaatggccaccggggtgatgaaaccttctcagttgcatcgacccgtcaccttggatttgccccctccccctgctgctactgctgtacccgcttctaagcctgtcgctgccccgaaaccagtcgccgtagccaggtcacgtcccgggggcgctcctcgtccaaatgcgcactggcaaaatactctgaacagcatcgtgggtctaggcgtgcaaagtgtaaaacgccgtcgctgcttttaattaaatatggagtagcgcttaacttgcctatctgtgtatatgtgtcattacacgccgtcacagcagcagaggaaaaaaggaagaggtcgtgcgtcgacgctgagttactttcaagatggccaccccatcgatgctgccccaatgggcatacatgcacatcgccggacaggatgcttcggagtacctgagtccgggtctggtgcagttcgcccgcgccacagacacctacttcaatctgggaaataagtttagaaatcccaccgtagcgccgacccacgatgtgaccaccgaccgtagccagcggctcatgttgcgcttcgtgcccgttgaccgggaggacaatacatactcttacaaagtgcggtacaccctggccgtgggcgacaacagagtgctggatatggccagcacgttctttgacattaggggcgtgttggacagaggtcccagtttcaaaccctattctggtacggcttacaactctctggctcctaaaggcgctccaaatgcatctcaatggattgcaaaaggcgtaccaactgcagcagccgcaggcaatggtgaagaagaacatgaaacagaggagaaaactgctacttacacttttgccaatgctcctgtaaaagccgaggctcaaattacaaaagagggcttaccaataggtttggagatttcagctgaaaacgaatctaaacccatctatgcagataaactttatcagccagaacctcaagtgggagatgaaacttggactgacctagacggaaaaaccgaagagtatggaggcagggctctaaagcctactactaacatgaaaccctgttacgggtcctatgcgaagcctactaatttaaaaggtggtcaggcaaaaccgaaaaactcggaaccgtcgagtgaaaaaattgaatatgatattgacatggaattttttgataactcatcgcaaagaacaaacttcagtcctaaaattgtcatgtatgcagaaaatgtaggtttggaaacgccagacactcatgtagtgtacaaacctggaacagaagacacaagttccgaagctaatttgggacaacagtctatgcccaacagacccaactacattggcttcagagataactttattggactcatgtactataacagtactggtaacatgggggtgctggctggtcaagcgtctcagttaaatgcagtggttgacttgcaggacagaaacacagaactttcttaccaactcttgcttgactctctgggcgacagaaccagatactttagcatgtggaatcaggctgtggacagttatgatcctgatgtacgtgttattgaaaatcatggtgtggaagatgaacttcccaactattgttttccactggacggcataggtgttccaacaaccagttacaaatcaatagttccaaatggagaagataataataattggaaagaacctgaagtaaatggaacaagtgagatcggacagggtaatttgtttgccatggaaattaaccttcaagccaatctatggcgaagtttcctttattccaatgtggctctgtatctcccagactcgtacaaatacaccccgtccaatgtcactcttccagaaaacaaaaacacctacgactacatgaacgggcgggtggtgccgccatctctagtagacacctatgtgaacattggtgccaggtggtctctggatgccatggacaatgtcaacccattcaaccaccaccgtaacgctggcttgcgttaccgatctatgcttctgggtaacggacgttatgtgcctttccacatacaagtgcctcaaaaattcttcgctgttaaaaacctgctgcttctcccaggctcctacacttatgagtggaactttaggaaggatgtgaacatggttctacagagttccctcggtaacgacctgcgggtagatggcgccagcatcagtttcacgagcatcaacctctatgctacttttttccccatggctcacaacaccgcttccacccttgaagccatgctgcggaatgacaccaatgatcagtcattcaacgactacctatctgcagctaacatgctctaccccattcctgccaatgcaaccaatattcccatttccattccttctcgcaactgggcggctttcagaggctggtcatttaccagactgaaaaccaaagaaactccctctttggggtctggatttgacccctactttgtctattctggttctattccctacctggatggtaccttctacctgaaccacacttttaagaaggtttccatcatgtttgactcttcagtgagctggcctggaaatgacaggttactatctcctaacgaatttgaaataaagcgcactgtggatggcgaaggctacaacgtagcccaatgcaacatgaccaaagactggttcttggtacagatgctcgccaactacaacatcggctatcagggcttctacattccagaaggatacaaagatcgcatgtattcatttttcagaaacttccagcccatgagcaggcaggtggttgatgaggtcaattacaaagacttcaaggccgtcgccataccctaccaacacaacaactctggctttgtgggttacatggctccgaccatgcgccaaggtcaaccctatcccgctaactatccctatccactcattggaacaactgccgtaaatagtgttacgcagaaaaagttcttgtgtgacagaaccatgtggcgcataccgttctcgagcaacttcatgtctatgggggcccttacagacttgggacagaatatgctctatgccaactcagctcatgctctggacatgacctttgaggtggatcccatggatgagcccaccctgctttatcttctcttcgaagttttcgacgtggtcagagtgcatcagccacaccgcggcatcatcgaggcagtctacctgcgtacaccgttctcggccggtaacgctaccacgtaagaagcttcttgcttcttgcaaatagcagctgcaaccatggcctgcggatcccaaaacggctccagcgagcaagagctcagagccattgtccaagacctgggttgcggaccctattttttgggaacctacgataagcgcttcccggggttcatggcccccgataagctcgcctgtgccattgtaaatacggccggacgtgagacggggggagagcactggttggctttcggttggaacccacgttctaacacctgctacctttttgatccttttggattctcggatgatcgtctcaaacagatttaccagtttgaatatgagggtctcctgcgccgcagcgctcttgctaccaaggaccgctgtattacgctggaaaaatctacccagaccgtgcagggcccccgttctgccgcctgcggacttttctgctgcatgttccttcacgcctttgtgcactggcctgaccgtcccatggacggaaaccccaccatgaaattgctaactggagtgccaaacaacatgcttcattctcctaaagtccagcccaccctgtgtgacaatcaaaaagcactctaccattttcttaatacccattcgccttattttcgctctcatcgtacacacatcgaaagggccactgcgttcgaccgtatggatgttcaataatgactcatgtaaacaacgtgttcaataaacatcactttatttttttacatgtatcaaggctctggattacttatttatttacaagtcgaatgggttctgacgagaatcagaatgacccgcaggcagtgatacgttgcggaactgatacttgggttgccacttgaattcgggaatcaccaacttgggaaccggtatatcgggcaggatgtcactccacagctttctggtcagctgcaaagctccaagcaggtcaggagccgaaatcttgaaatcacaattaggaccagtgctctgagcgcgagagttgcggtacaccggattgcagcactgaaacaccatcagcgacggatgtctcacgcttgccagcacggtgggatctgcaatcatgcccacatccagatcttcagcattggcaatgctgaacggggtcatcttgcaggtctgcctacccatggcgggcacccaattaggcttgtggttgcaatcgcagtgcagggggatcagtatcatcttggcctgatcctgtctgattcctggatacacggctctcatgaaagcatcatattgcttgaaagcctgctgggctttactaccctcggtataaaacatcccgcaggacctgctcgaaaactggttagctgcacagccggcatcattcacacagcagcgggcgtcattgttggctatttgcaccacacttctgccccagcggttttgggtgattttggttcgctcgggattctcctttaaggctcgttgtccgttctcgctggccacatccatctcgataatctgctccttctgaatcataatattgccatgcaggcacttcagcttgccctcataatcattgcagccatgaggccacaacgcacagcctgtacattcccaattatggtgggcgatctgagaaaaagaatgtatcattccctgcagaaatcttcccatcatcgtgctcagtgtcttgtgactagtgaaagttaactggatgcctcggtgctcttcgtttacgtactggtgacagatgcgcttgtattgttcgtgttgctcaggcattagtttaaaacaggttctaagttcgttatccagcctgtacttctccatcagcagacacatcacttccatgcctttctcccaagcagacaccaggggcaagctaatcggattcttaacagtgcaggcagcagctcctttagccagagggtcatctttagcgatcttctcaatgcttcttttgccatccttctcaacgatgcgcacgggcgggtagctgaaacccactgctacaagttgcgcctcttctctttcttcttcgctgtcttgactgatgtcttgcatggggatatgtttggtcttccttggcttctttttggggggtatcggaggaggaggactgtcgctccgttccggagacagggaggattgtgacgtttcgctcaccattaccaactgactgtcggtagaagaacctgaccccacacggcgacaggtgtttttcttcgggggcagaggtggaggcgattgcgaagggctgcggtccgacctggaaggcggatgactggcagaaccccttccgcgttcgggggtgtgctccctgtggcggtcgcttaactgatttccttcgcggctggccattgtgttctcctaggcagagaaacaacagacatggaaactcagccattgctgtcaacatcgccacgagtgccatcacatctcgtcctcagcgacgaggaaaaggagcagagcttaagcattccaccgcccagtcctgccaccacctctaccctagaagataaggaggtcgacgcatctcatgacatgcagaataaaaaagcgaaagagtctgagacagacatcgagcaagacccgggctatgtgacaccggtggaacacgaggaagagttgaaacgctttctagagagagaggatgaaaactgcccaaaacagcgagcagataactatcaccaagatgctggaaatagggatcagaacaccgactacctcatagggcttgacggggaagacgcgctccttaaacatctagcaagacagtcgctcatagtcaaggatgcattattggacagaactgaagtgcccatcagtgtggaagagctcagctgcgcctacgagcttaaccttttttcacctcgtactccccccaaacgtcagccaaacggcacctgcgagccaaatcctcgcttaaacttttatccagcttttgctgtgccagaagtactggctacctatcacatcttttttaaaaatcaaaaaattccagtctcctgccgcgctaatcgcacccgcgccgatgccctactcaatctgggacctggttcacgcttacctgatatagcttccttggaagaggttccaaagatcttcgagggtctgggcaataatgagactcgggccgcaaatgctctgcaaaagggagaaaatggcatggatgagcatcacagcgttctggtggaattggaaggcgataatgccagactcgcagtactcaagcgaagcgtcgaggtcacacacttcgcatatcccgctgtcaacctgccccctaaagtcatgacggcggtcatggaccagttactcattaagcgcgcaagtcccctttcagaagacatgcatgacccagatgcctgtgatgagggtaaaccagtggtcagtgatgagcagctaacccgatggctgggcaccgactctccccgggatttggaagagcgtcgcaagcttatgatggccgtggtgctggttaccgtagaactagagtgtctccgacgtttctttaccgattcagaaaccttgcgcaaactcgaagagaatctgcactacacttttagacacggctttgtgcggcaggcatgcaagatatctaacgtggaactcaccaacctggtttcctacatgggtattctgcatgagaatcgcctaggacaaagcgtgctgcacagcacccttaagggggaagcccgccgtgattacatccgcgattgtgtctatctctacctgtgccacacgtggcaaaccggcatgggtgtatggcagcaatgtttagaagaacagaacttgaaagagcttgacaagctcttacagaaatctcttaaggttctgtggacagggttcgacgagcgcaccgtcgcttccgacctggcagacctcatcttcccagagcgtctcagggttactttgcgaaacggattgcctgactttatgagccagagcatgcttaacaattttcgctctttcatcctggaacgctccggtatcctgcccgccacctgctgcgcactgccctccgactttgtgcctctcacctaccgcgagtgccccccgccgctatggagtcactgctacctgttccgtctggccaactatctctcctaccactcggatgtgatcgaggatgtgagcggagacggcttgctggagtgccactgccgctgcaatctgtgcacgccccaccggtccctagcttgcaacccccagttgatgagcgaaacccagataataggcacctttgaattgcaaggccccagcagccaaggcgatgggtcttctcctgggcaaagtttaaaactgaccccgggactgtggacctccgcctacttgcgcaagtttgctccggaagattaccacccctatgaaatcaagttctatgaggaccaatcacagcctccaaaggccgaactttcggcttgcgtcatcacccagggggcaattctggcccaattgcaagccatccaaaaatcccgccaagaatttctactgaaaaagggtaagggggtctaccttgacccccagaccggcgaggaactcaacacaaggttccctcaggatgtcccaacgacgagaaaacaagaagttgaaggtgcagccgccgcccccagaagatatggaggaagattgggacagtcaggcagaggaggcggaggaggacagtctggaggacagtctggaggaagacagtttggaggaggaaaacgaggaggcagaggaggtggaagaagtaaccgccgacaaacagttatcctcggctgcggagacaagcaacagcgctaccatctccgctccgagtcgaggaacccggcggcgtcccagcagtagatgggacgagaccggacgcttcccgaacccaaccagcgcttccaagaccggtaagaaggatcggcagggatacaagtcctggcgggggcataagaatgccatcatctcctgcttgcatgagtgcgggggcaacatatccttcacgcggcgctacttgctattccaccatggggtgaactttccgcgcaatgttttgcattactaccgtcacctccacagcccctactatagccagcaaatcccgacagtctcgacagataaagacagcggcggcgacctccaacagaaaaccagcagcggcagttagaaaatacacaacaagtgcagcaacaggaggattaaagattacagccaacgagccagcgcaaacccgagagttaagaaatcggatctttccaaccctgtatgccatcttccagcagagtcggggtcaagagcaggaactgaaaataaaaaaccgatctctgcgttcgctcaccagaagttgtttgtatcacaagagcgaagatcaacttcagcgcactctcgaggacgccgaggctctcttcaacaagtactgcgcgctgactcttaaagagtaggcagcgaccgcgcttattcaaaaaaggcgggaattacatcatcctcgacatgagtaaagaaattcccacgccttacatgtggagttatcaaccccaaatgggattggcagcaggcgcctcccaggactactccacccgcatgaattggctcagcgccgggccttctatgatttctcgagttaatgatatacgcgcctaccgaaaccaaatacttttggaacagtcagctcttaccaccacgccccgccaacaccttaatcccagaaattggcccgccgccctagtgtaccaggaaagtcccgctcccaccactgtattacttcctcgagacgcccaggccgaagtccaaatgactaatgcaggtgcgcagttagctggcggctccaccctatgtcgtcacaggcctcggcataatataaaacgcctgatgatcagaggccgaggtatccagctcaacgacgagtcggtgagctctccgcttggtctacgaccagacggaatctttcagattgccggctgcgggagatcttccttcacccctcgtcaggctgttctgactttggaaagttcgtcttcgcaaccccgctcgggcggaatcgggaccgttcaatttgtagaggagtttactccctctgtctacttcaaccccttctccggatctcctgggcactacccggacgagttcataccgaacttcgacgcgattagcgagtcagtggacggctacgattgatgtctggtgacgcggctgagctatctcggctgcgacatctagaccactgccgccgctttcgctgctttgcccgggaacttattgagttcatctacttcgaactccccaaggatcaccctcaaggtccggcccacggagtgcggattactatcgaaggcaaaatagactctcgcctgcaacgaattttctcccagcggcccgtgctgatcgagcgagaccagggaaacaccacggtttccatctactgcatttgtaatcaccccggattgcatgaaagcctttgctgtcttatgtgtactgagtttaataaaaactgaattaagactctcctacggactgccgcttcttcaacccggattttacaaccagaagaacaaaacttttcctgtcgtccaggactctgttaacttcacctttcctactcacaaactagaagctcaacgactacaccgcttttccagaagcattttccctactaatactactttcaaaaccggaggtgagctccacggtctccctacagaaaacccttgggtggaagcgggccttgtagtactaggaattcttgcgggtgggcttgtgattattctttgctacctatacacaccttgcttcactttcctagtggtgttgtggtattggtttaaaaaatggggcccatactagtcttgcttgttttactttcgcttttggaaccgggttctgccaattacgatccatgtctagactttgacccagaaaactgcacacttacttttgcacccgacacaagccgcatctgtggagttcttattaagtgcggatgggaatgcaggtccgttgaaattacacacaataacaaaacctggaacaataccttatccaccacatgggagccaggagttcccgagtggtacactgtctctgtccgaggtcctgacggttccatccgcattagtaacaacactttcattttttctgaaatgtgcgatctggccatgttcatgagcaaacagtattctctatggcctcctagcaaggacaacatcgtaacgttctccattgcttattgcttgtgcgcttgccttcttactgctttactgtgcgtatgcatacacctgcttgtaaccactcgcatcaaaaacgccaataacaaagaaaaaatgccttaacctctttctgtttacagacatggcttctcttacatctctcatatttgtcagcattgtcactgccgctcacggacaaacagtcgtctctatcccactaggacataattacactctcataggacccccaatcacttcagaggtcatctggaccaaactgggaagcgttgattactttgatataatctgtaacaaaacaaaaccaataatagtaacttgcaacatacaaaatcttacattgattaatgttagcaaagtttacagcggttactattatggttatgacagatacagtagtcaatatagaaattacttggttcgtgttacccagttgaaaaccacgaaaatgccaaatatggcaaagattcgatccgatgacaattctctagaaacttttacatctcccaccacacccgacgaaaaaaacatcccagattcaatgattgcaattgttgcagcggtggcagtggtgatggcactaataataatatgcatgcttttatatgcttgtcgctacaaaaagtttcatcctaaaaaacaagatctcctactaaggcttaacatttaatttctttttatacagccatggtttccactaccacattccttatgcttactagtctcgcaactctgacttctgctcgctcacacctcactgtaactataggctcaaactgcacactaaaaggacctcaaggtggtcatgtcttttggtggagaatatatgacaatggatggtttacaaaaccatgtgaccaacctggtagatttttctgcaacggcagagacctaaccattatcaacgtgacagcaaatgacaaaggcttctattatggaaccgactataaaagtagtttagattataacattattgtactgccatctaccactccagcaccccgcacaactactttctctagcagcagtgtcgctaacaatacaatttccaatccaacctttgccgcgcttttaaaacgcactgtgaataattctacaacttcacatacaacaatttccacttcaacaatcagcatcatcgctgcagtgacaattggaatatctattcttgtttttaccataacctactacgcctgctgctatagaaaagacaaacataaaggtgatccattacttagatttgatatttaatttgttctttttttttatttacagtatggtgaacaccaatcatggtacctagaaatttcttcttcaccatactcatctgtgcttttaatgtttgcgctactttcacagcagtagccacagcaaccccagactgtataggagcatttgcttcctatgcactttttgcttttgttacttgcatctgcgtatgtagcatagtctgcctggttattaattttttccaacttctagactggatccttgtgcgaattgcctacctgcgccaccatcccgaataccgcaaccaaaatatcgcggcacttcttagactcatctaaaaccatgcaggctatactaccaatatttttgcttctattgcttccctacgctgtctcaaccccagctgcctatagtactccaccagaacaccttagaaaatgcaaattccaacaaccgtggtcatttcttgcttgctatcgagaaaaatcagaaatccccccaaatttaataatgattgctggaataattaatataatctgttgcaccataatttcatttttgatataccccctatttgattttggctggaatgctcccaatgcacatgatcatccacaagacccagaggaacacattcccccacaaaacatgcaacatccaatagcgctaatagattacgaaagtgaaccacaacccccactactccctgctattagttacttcaacctaaccggcggagatgactgaaacactcaccacctccaattccgccgaggatctgctcgatatggacggccgcgtctcagaacaacgacttgcccaactacgcatccgccagcagcaggaacgcgtggccaaagagctcagagatgtcatccaaattcaccaatgcaaaaaaggcatattctgtttggtaaaacaagccaagatatcctacgagatcaccgctactgaccatcgcctctcttacgaacttggcccccaacgacaaaaatttacctgcatggtgggaatcaaccccatagttatcacccaacaaagtggagatactaagggttgcattcactgctcctgcgattccatcgagtgcacctacaccctgctgaagaccctatgcggcctaagagacctgctaccaatgaattaaaaaaaaatgattaataaaaaatcacttacttgaaatcagcaataaggtctctgttgaaattttctcccagcagcacctcacttccctcttcccaactctggtattctaaaccccgttcagcggcatactttctccatactttaaaggggatgtcaaattttagctcctctcctgtacccacaatcttcatgtctttcttcccagatgaccaagagagtccggctcagtgactccttcaaccctgtctacccctatgaagatgaaagcacctcccaacacccctttataaacccagggtttatttccccaaatggcttcacacaaagcccagacggagttcttactttaaaatgtttaaccccactaacaaccacaggcggatctctacagctaaaagtgggagggggacttacagtggatgacactgatggtaccttacaagaaaacatacgtgctacagcacccattactaaaaataatcactctgtagaactatccattggaaatggattagaaactcaaaacaataaactatgtgccaaattgggaaatgggttaaaatttaacaacggtgacatttgtataaaggatagtattaacaccttatggactggaataaaccctccacctaactgtcaaattgtggaaaacactaatacaaatgatggcaaacttactttagtattagtaaaaaatggagggcttgttaatggctacgtgtctctagttggtgtatcagacactgtgaaccaaatgttcacacaaaagacagcaaacatccaattaagattatattttgactcttctggaaatctattaactgaggaatcagacttaaaaattccacttaaaaataaatcttctacagcgaccagtgaaactgtagccagcagcaaagcctttatgccaagtactacagcttatcccttcaacaccactactagggatagtgaaaactacattcatggaatatgttactacatgactagttatgatagaagtctatttcccttgaacatttctataatgctaaacagccgtatgatttcttccaatgttgcctatgccatacaatttgaatggaatctaaatgcaagtgaatctccagaaagcaacatagctacgctgaccacatccccctttttcttttcttacattacagaagacgacaactaaaataaagtttaagtgtttttatttaaaatcacaaaattcgagtagttattttgcctccaccttcccatttgacagaatacaccaatctctccccacgcacagctttaaacatttggataccattagagatagacattgttttagattccacattccaaacagtttcagagcgagccaatctggggtcagtgatagataaaaatccatcgcgatagtcttttaaagcgctttcacagtccaactgctgcggatgcgactccggagtttggatcacggtcatctggaagaagaacgatgggaatcataatccgaaaacggtatcggacgattgtgtctcatcaaacccacaagcagccgctgtctgcgtcgctccgtgcgactgctgtttatgggatcagggtccacagtttcctgaagcatgattttaatagcccttaacatcaactttctggtgcgatgcgcgcagcaacgcattctgatttcactcaaatctttgcagtaggtacaacacattattacaatattgtttaataaaccataattaaaagcgctccagccaaaactcatatctgatataatcgcccctgcatgaccatcataccaaagtttaatataaattaaatgacgttccctcaaaaacacactacccacatacatgatctcttttggcatgtgcatattaacaatctgtctgtaccatggacaacgttggttaatcatgcaacccaatataaccttccggaaccacactgccaacaccgctcccccagccatgcattgaagtgaaccctgctgattacaatgacaatgaagaacccaattctctcgaccgtgaatcacttgagaatgaaaaatatctatagtggcacaacatagacataaatgcatgcatcttctcataatttttaactcctcaggatttagaaacatatcccagggaataggaagctcttgcagaacagtaaagctggcagaacaaggaagaccacgaacacaacttacactatgcatagtcatagtatcacaatctggcaacagcgggtggtcttcagtcatagaagctcgggtttcattttcctcacaacgtggtaactgggctctggtgtaagggtgatgtctggcgcatgatgtcgagcgtgcgcgcaaccttgtcataatggagttgcttcctgacattctcgtattttgtatagcaaaacgcggccctggcagaacacactcttcttcgccttctatcctgccgcttagcgtgttccgtgtgatagttcaagtacagccacactcttaagttggtcaaaagaatgctggcttcagttgtaatcaaaactccatcgcatctaattgttctgaggaaatcatccacggtagcatatgcaaatcccaaccaagcaatgcaactggattgcgtttcaagcaggagaggagagggaagagacggaagaaccatgttaatttttattccaaacgatctcgcagtacttcaaattgtagatcgcgcagatggcatctctcgcccccactgtgttggtgaaaaagcacagctaaatcaaaagaaatgcgattttcaaggtgctcaacggtggcttccaacaaagcctccacgcgcacatccaagaacaaaagaataccaaaagaaggagcattttctaactcctcaatcatcatattacattcctgcaccattcccagataattttcagctttccagccttgaattattcgtgtcagttcttgtggtaaatccaatccacacattacaaacaggtcccggagggcgccctccaccaccattcttaaacacaccctcataatgacaaaatatcttgctcctgtgtcacctgtagcgaattgagaatggcaacatcaattgacatgcccttggctctaagttcttctttaagttctagttgtaaaaactctctcatattatcaccaaactgcttagccagaagccccccgggaacaagagcaggggacgctacagtgcagtacaagcgcagacctccccaattggctccagcaaaaacaagattggaataagcatattgggaaccaccagtaatatcatcgaagttgctggaaatataatcaggcagagtttcttgtagaaattgaataaaagaaaaatttgccaaaaaaacattcaaaacctctgggatgcaaatgcaataggttaccgcgctgcgctccaacattgttagttttgaattagtctgcaaaaataaaaaaaaaacaagcgtcatatcatagtagcctgacgaacaggtggataaatcagtctttccatcacaagacaagccacagggtctccagctcgaccctcgtaaaacctgtcatcgtgattaaacaacagcaccgaaagttcctcgcggtgaccagcatgaataagtcttgatgaagcatacaatccagacatgttagcatcagttaaggagaaaaaacagccaacatagcctttgggtataattatgcttaatcgtaagtatagcaaagccacccctcgcggatacaaagtaaaaggcacaggagaataaaaaatataattatttctctgctgctgtttaggcaacgtcgcccccggtccctctaaatacacatacaaagcctcatcagccatggcttaccagagaaagtacagcgggcacacaaaccacaagctctaaagtcactctccaacctctccacaatatatatacacaagccctaaactgacgtaatgggactaaagtgtaaaaaatcccgccaaacccaacacacaccccgaaactgcgtcaccagggaaaagtacagtttcacttccgcaatcccaacaagcgtcacttcctctttctcacggtacgtcacatcccattaacttacaacgtcattttcccacggccgcgccgccccttttaaccgttaaccccacagccaatcaccacacggcccacactttttaaaatcacctcatttacatattggcaccattccatctataaggtatattattgatgatg

SEQ ID NO: 89 - DNA, 34794 bp, Human adenovirus
  misc_feature 1..34794: note = Human adenovirus 35, GenBank Accession No. AX049983
  source 1..34794: mol_type = genomic DNA
catcatcaataatataccttatagatggaatggtgccaatatgtaaatgaggtgattttaaaaagtgtgggccgtgtggtgattggctgtggggttaacggttaaaaggggcggcgcggccgtgggaaaatgacgttttatgggggtggagtttttttgcaagttgtcgcgggaaatgttacgcataaaaaggcttcttttctcacggaactacttagttttcccacggtatttaacaggaaatgaggtagttttgaccggatgcaagtgaaaattgctgattttcgcgcgaaaactgaatgaggaagtgtttttctgaataatgtggtatttatggcagggtggagtatttgttcagggccaggtagactttgacccattacgtggaggtttcgattaccgtgttttttacctgaatttccgcgtaccgtgtcaaagtcttctgtttttacgtaggtgtcagctgatcgctagggtatttatacctcagggtttgtgtcaagaggccactcttgagtgccagcgagaagagttttctcctctgcgccggcagtttaataataaaaaaatgagagatttgcgatttctgcctcaggaaataatctctgctgagactggaaatgaaatattggagcttgtggtgcacgccctgatgggagacgatccggagccacctgtgcagctttttgagcctcctacgcttcaggaactgtatgatttagaggtagagggatcggaggattctaatgaggaagctgtgaatggcttttttaccgattctatgcttttagctgctaatgaaggattagaattagatccgcctttggacactttcaatactccaggggtgattgtggaaagcggtacaggtgtaagaaaattacctgatttgagttccgtggactgtgatttgcactgctatgaagacgggtttcctccgagtgatgaggaggaccatgaaaaggagcagtccatgcagactgcagcgggtgagggagtgaaggctgccaatgttggttttcagttggattgcccggagcttcctggacatggctgtaagtcttgtgaatttcacaggaaaaatactggagtaaaggaactgttatgttcgctttgttatatgagaacgcactgccactttatttacagtaagtgtgtttaagttaaaatttaaaggaatatgctgtttttcacatgtatattgagtgtgagttttgtgcttcttattataggtcctgtgtctgatgctgatgaatcaccatctcctgattctactacctcacctcctgatattcaagcacctgttcctgtggacgtgcgcaagcccattcctgtgaagcttaagcctgggaaacgtccagcagtggagaaacttgaggacttgttacagggtggggacggacctttggacttgagtacacggaaacgtccaagacaataagtgttccatatccgtgtttacttaaggtgacgtcaatatttgtgtgagagtgcaatgtaataaaaatatgttaactgttcactggtttttattgctttttgggcggggactcaggtatataagtagaagcagacctgtgtggttagctcataggagctggctttcatccatggaggtttgggccattttggaagaccttaggaagactaggcaactgttagagagcgcttcggacggagtctccggtttttggagattctggttcgctagtgaattagctagggtagtttttaggataaaacaggactataaacaagaatttgaaaagttgttggtagattgcccaggactttttgaagctcttaatttgggccatcaggttcactttaaagaaaaagttttatcagttttagacttttcaaccccaggtagaactgctgctgctgtggcttttcttacttttatattagataaatggatcccgcagactcatttcagcaggggatacgttttggatttcatagccacagcattgtggagaacatggaaggttcgcaagatgaggacaatcttaggttactggccagtgcagcctttgggtgtagcgggaatcctgaggcatccaccggtcatgccagcggttctggaggaggaacagcaagaggacaacccgagagccggcctggaccctccagtggaggaggcggagtagctgacttgtctcctgaactgcaacgggtgcttactggatctacgtccactggacgggataggggcgttaagagggagagggcatccagtggtactgatgctagatctgagttggctttaagtttaatgagtcgcagacgtcctgaaaccatttggtggcatgaggttcagaaagagggaagggatgaagtttctgtattgcaggagaaatattcactggaacaggtgaaaacatgttggttggagccagaggatgattgggcggtggccattaaaaattatgccaagatagctttgaggcctgataaacagtataagatcagtagacggattaatatccggaatgcttgttacatatctggaaatggggctgaggtggtaatagatactcaagacaagacagttattagatgctgcatgatggatatgtggcctggagtagtcggtatggaagcagtcacttttgtaaatgttaagtttaggggagatggttataatggaatagtgtttatggccaataccaaacttatattgcatggttgtagcttttttggtttcaacaatacctgtgtagatgcctggggacaggttagtgtacgggggtgtagtttctatgcgtgttggattgccacagctggcagaaccaagagtcaattgtctctgaagaaatgcatattccaaagatgtaacctgggcattctgaatgaaggcgaagcaagggtccgtcactgcgcttctacagatactggatgttttattttaattaagggaaatgccagcgtaaagcataacatgatttgtggtgcttccgatgagaggccttatcaaatgctcacttgtgctggtgggcattgtaatatgctggctactgtgcatattgtttcccatcaacgcaaaaaatggcctgtttttgatcacaatgtgttgaccaagtgcaccatgcatgcaggtgggcgtagaggaatgtttatgccttaccagtgtaacatgaatcatgtgaaagtgttgttggaaccagatgccttttccagaatgagcctaacaggaatctttgacatgaacacgcaaatctggaagatcctgaggtatgatgatacgagatcgagggtgcgcgcatgcgaatgcggaggcaagcatgccaggttccagccggtgtgtgtagatgtgaccgaagatctcagaccggatcatttggttattgcccgcactggagcagagttcggatccagtggagaagaaactgactaaggtgagtattgggaaaactttggggtgggattttcagatggacagattgagtaaaaatttgttttttctgtcttgcagctgacatgagtggaaatgcttcttttaaggggggagtcttcagcccttatctgacagggcgtctcccatcctgggcaggagttcgtcagaatgttatgggatctactgtggatggaagacccgttcaacccgccaattcttcaacgctgacctatgctactttaagttcttcacctttggacgcagctgcagccgctgccgccgcctctgtcgccgctaacactgtgcttggaatgggttactatggaagcatcgtggctaattccacttcctctaataacccttctacactgactcaggacaagttacttgtccttttggcccagctggaggctttgacccaacgtctgggtgaactttctcagcaggtggccgagttgcgagtacaaactgagtctgctgtcggcacggcaaagtctaaataaaaaaaattccagaatcaatgaataaataaacgagcttgttgttgatttaaaatcaagtgtttttatttcatttttcgcgcacggtatgccctggaccaccgatctcgatcattgagaactcggtggattttttccagaatcctatagaggtgggattgaatgtttagatacatgggcattaggccgtctttggggtggagatagctccattgaagggattcatgctccggggtagtgttgtaaatcacccagtcataacaaggtcgcagtgcatggtgttgcacaatatcttttagaagtaggctgattgccacagataagcccttggtgtaggtgtttacaaaccggttgagctgggaggggtgcattcgaggtgaaattatgtgcattttggattggatttttaagttggcaatattgccgccaagatcccgtcttgggttcatgttatgaaggactaccaagacggtgtatccggtacatttaggaaatttatcgtgcagcttggatggaaaagcgtggaaaaatttggagacacccttgtgtcctccgagattttccatgcactcatccatgataatagcaatggggccgtgggcagcggcgcgggcaaacacgttccgtgggtctgacacatcatagttatgttcctgagttaaatcatcataagccattttaatgaatttggggcggagcgtaccagattggggtatgaatgttccttcgggccccggagcatagttcccctcacagatttgcatttcccaagctttcagttctgagggtggaatcatgtccacctggggggctatgaagaacaccgtttcgggggcgggggtgattagttgggatgatagcaagtttctgagcaattgagatttgccacatccggtggggccataaataattccgattacaggttgcaggtggtagtttagggaacggcaactgccgtcttctcgaagcaagggggccacctcgttcatcatttcccttacatgcatattttcccgcaccaaatccattaggaggcgctctcctcctagtgatagaagttcttgtagtgaggaaaagtttttcagcggttttagaccgtcagccatgggcattttggaaagagtttgctgcaaaagttctagtctgttccacagttcagtgatgtgttctatggcatctcgatccagcagacctcctcgtttcgcgggtttggacggctcctggagtagggtatgagacgatgggcgtccagcgctgccagggttcggtccttccagggtctcagtgttcgagtcagggttgtttccgtcacagtgaaggggtgtgcgcctgcttgggcgcttgccagggtgcgcttcagactcattctgctggtggagaacttctgtcgcttggcgccctgtatgtcggccaagtagcagtttaccatgagttcgtagttgagcgcctcggctgcgtggcctttggcgcggagcttacctttggaagttttcttgcataccgggcagtataggcatttcagcgcatacagcttgggcgcaaggaaaatggattctggggagtatgcatccgcgccgcaggaggcgcaaacagtttcacattccaccagccaggttaaatccggttcattggggtcaaaaacaagttttccgccatattttttgatgcgtttcttacctttggtctccataagttcgtgtcctcgttgagtgacaaacaggctgtccgtatctccgtagactgattttacaggcctcttctccagtggagtgcctcggtcttcttcgtacaggaactctgaccactctgatacaaaggcgcgcgtccaggccagcacaaaggaggctatgtgggaggggtagcgatcgttgtcaaccagggggtccaccttttccaaagtatgcaaacacatgtcaccctcttcaacatccaggaatgtgattggcttgtaggtgtatttcacgtgacctggggtccccgctgggggggtataaaagggggcggttctttgctcttcctcactgtcttccggatcgctgtccaggaacgtcagctgttggggtaggtattccctctcgaaggcgggcatgacctctgcactcaggttgtcagtttctaagaacgaggaggatttgatattgacagtgccggttgagatgcctttcatgaggttttcgtccatttggtcagaaaacacaatttttttattgtcaagtttggtggcaaatgatccatacagggcgttggataaaagtttggcaatggatcgcatggtttggttcttttccttgtccgcgcgctctttggcggcgatgttgagttggacatactcgcgtgccaggcacttccattcggggaagatagttgttaattcatctggcacgattctcacttgccaccctcgattatgcaaggtaattaaatccacactggtggccacctcgcctcgaaggggttcattggtccaacagagcctacctcctttcctagaacagaaagggggaagtgggtctagcataagttcatcgggagggtctgcatccatggtaaagattcccggaagtaaatccttatcaaaatagctgatgggagtggggtcatctaaggccatttgccattctcgagctgccagtgcgcgctcatatgggttaaggggactgccccagggcatgggatgggtgagagcagaggcatacatgccacagatgtcatagacgtagatgggatcctcaaagatgcctatgtaggttggatagcatcgcccccctctgatacttgctcgcacatagtcatatagttcatgtgatggcgctagcagccccggacccaagttggtgcgattgggtttttctgttctgtagacgatctggcgaaagatggcgtgagaattggaagagatggtgggtctttgaaaaatgttgaaatgggcatgaggtagacctacagagtctctgacaaagtgggcataagattcttgaagcttggttaccagttcggcggtgacaagtacgtctagggcgcagtagtcaagtgtttcttgaatgatgtcataacctggttggtttttcttttcccacagttcgcggttgagaaggtattcttcgcgatccttccagtactcttctagcggaaacccgtctttgtctgcacggtaagatcctagcatgtagaactgattaactgccttgtaagggcagcagcccttctctacgggtagagagtatgcttgagcagcttttcgtagcgaagcgtgagtaagggcaaaggtgtctctgaccatgactttgagaaattggtatttgaagtccatgtcgtcacaggctccctgttcccagagttggaagtctacccgtttcttgtaggcggggttgggcaaagcgaaagtaacatcattgaagagaatcttaccggctctgggcataaaattgcgagtgatgcggaaaggctgtggtacttccgctcgattgttgatcacctgggcagctaggacgatttcgtcgaaaccgttgatgttgtgtcctacgatgtataattctatgaaacgcggcgtgcctctgacgtgaggtagcttactgagctcatcaaaggttaggtctgtggggtcagataaggcgtagtgttcgagagcccattcgtgcaggtgaggatttgcatgtaggaatgatgaccaaagatctaccgccagtgctgtttgtaactggtcccgatactgacgaaaatgccggccaattgccattttttctggagtgacacagtagaaggttctggggtcttgttgccatcgatcccacttgagtttaatggctagatcgtgggccatgttgacgagacgctcttctcctgagagtttcatgaccagcatgaaaggaactagttgtttgccaaaggatcccatccaggtgtaagtttccacatcgtaggtcaggaagagtctttctgtgcgaggatgagagccgatcgggaagaactggatttcctgccaccagttggaggattggctgttgatgtgatggaagtagaagtttctgcggcgcgccgagcattcgtgtttgtgcttgtacagacggccgcagtagtcgcagcgttgcacgggttgtatctcgtgaatgagctgtacctggcttcccttgacgagaaatttcagtgggaagccgaggcctggcgattgtatctcgtgctcttctatattcgctgtatcggcctgttcatcttctgtttcgatggtggtcatgctgacgagcccccgcgggaggcaagtccagacctcggcgcgggaggggcggagctgaaggacgagagcgcgcaggctggagctgtccagagtcctgagacgctgcggactcaggttagtaggtagggacagaagattaacttgcatgatcttttccagggcgtgcgggaggttcagatggtacttgatttccacaggttcgtttgtagagacgtcaatggcttgcagggttccgtgtcctttgggcgccactaccgtacctttgttttttcttttgatcggtggtggctctcttgcttcttgcatgctcagaagcggtgacggggacgcgcgccgggcggcagcggttgttccggacccgggggcatggctggtagtggcacgtcggcgccgcgcacgggcaggttctggtattgcgctctgagaagacttgcgtgcgccaccacgcgtcgattgacgtcttgtatctgacgtctctgggtgaaagctaccggccccgtgagcttgaacctgaaagagagttcaacagaatcaatttcggtatcgttaacggcagcttgtctcagtatttcttgtacgtcaccagagttgtcctggtaggcgatctccgccatgaactgctcgatttcttcctcctgaagatctccgcgacccgctctttcgacggtggccgcgaggtcattggagatacggcccatgagttgggagaatgcattcatgcccgcctcgttccagacgcggctgtaaaccacggccccctcggagtctcttgcgcgcatcaccacctgagcgaggttaagctccacgtgtctggtgaagaccgcatagttgcataggcgctgaaaaaggtagttgagtgtggtggcaatgtgttcggcgacgaagaaatacatgatccatcgtctcagcggcatttcgctaacatcgcccagagcttccaagcgctccatggcctcgtagaagtccacggcaaaattaaaaaactgggagtttcgcgcggacacggtcaattcctcctcgagaagacggatgagttcggctatggtggcccgtacttcgcgttcgaaggctcccgggatctcttcttcctcttctatctcttcttccactaacatctcttcttcgtcttcaggcgggggcggagggggcacgcggcgacgtcgacggcgcacgggcaaacggtcgatgaatcgttcaatgacctctccgcggcggcggcgcatggtttcagtgacggcgcggccgttctcgcgcggtcgcagagtaaaaacaccgccgcgcatctccttaaagtggtgactgggaggttctccgtttgggagggagagggcgctgattatacattttattaattggcccgtagggactgcgcgcagagatctgatcgtgtcaagatccacgggatctgaaaacctttcgacgaaagcgtctaaccagtcacagtcacaaggtaggctgagtacggcttcttgtgggcgggggtggttatgtgttcggtctgggtcttctgtttcttcttcatctcgggaaggtgagacgatgctgctggtgatgaaattaaagtaggcagttctaagacggcggatggtggcgaggagcaccaggtctttgggtccggcttgctggatacgcaggcgattggccattccccaagcattatcctgacatctagcaagatctttgtagtagtcttgcatgagccgttctacgggcacttcttcctcacccgttctgccatgcatacgtgtgagtccaaatccgcgcattggttgtaccagtgccaagtcagctacgactctttcggcgaggatggcttgctgtacttgggtaagggtggcttgaaagtcatcaaaatccacaaagcggtggtaagcccctgtattaatggtgtaagcacagttggccatgactgaccagttaactgtctggtgaccagggcgcacgagctcggtgtatttaaggcgcgaataggcgcgggtgtcaaagatgtaatcgttgcaggtgcgcaccagatactggtaccctataagaaaatgcggcggtggttggcggtagagaggccatcgttctgtagctggagcgccaggggcgaggtcttccaacataaggcggtgatagccgtagatgtacctggacatccaggtgattcctgcggcggtagtagaagcccgaggaaactcgcgtacgcggttccaaatgttgcgtagcggcatgaagtagttcattgtaggcacggtttgaccagtgaggcgcgcgcagtcattgatgctctatagacacggagaaaatgaaagcgttcagcgactcgactccgtagcctggaggaacgtgaacgggttgggtcgcggtgtaccccggttcgagacttgtactcgagccggccggagccgcggctaacgtggtattggcactcccgtctcgacccagcctacaaaaatccaggatacggaatcgagtcgttttgctggtttccgaatggcagggaagtgagtcctattttttttttttttttgccgctcagatgcatcccgtgctgcgacagatgcgcccccaacaacagcccccctcgcagcagcagcagcagcaaccacaaaaggctgtccctgcaactactgcaactgccgccgtgagcggtgcgggacagcccgcctatgatctggacttggaagagggcgaaggactggcacgtctaggtgcgccttcgcccgagcggcatccgcgagttcaactgaaaaaagattctcgcgaggcgtatgtgccccaacagaacctatttagagacagaagcggcgaggagccggaggagatgcgagcttcccgctttaacgcgggtcgtgagctgcgtcacggtttggaccgaagacgagtgttgcgagacgaggatttcgaagttgatgaagtgacagggatcagtcctgccagggcacacgtggctgcagccaaccttgtatcggcttacgagcagacagtaaaggaagagcgtaacttccaaaagtcttttaataatcatgtgcgaaccctgattgcccgcgaagaagttacccttggtttgatgcatttgtgggatttgatggaagctatcattcagaaccctactagcaaacctctgaccgcccagctgtttctggtggtgcaacacagcagagacaatgaggctttcagagaggcgctgctgaacatcaccgaacccgaggggagatggttgtatgatcttatcaacattctacagagtatcatagtgcaggagcggagcctgggcctggccgagaaggtagctgccatcaattactcggttttgagcttgggaaaatattacgctcgcaaaatctacaagactccatacgttcccatagacaaggaggtgaagatagatgggttctacatgcgcatgacgctcaaggtcttgaccctgagcgatgatcttggggtgtatcgcaatgacagaatgcatcgcgcggttagcgccagcaggaggcgcgagttaagcgacagggaactgatgcacagtttgcaaagagctctgactggagctggaaccgagggtgagaattacttcgacatgggagctgacttgcagtggcagcctagtcgcagggctctgagcgccgcgacggcaggatgtgagcttccttacatagaagaggcggatgaaggcgaggaggaagagggcgagtacttggaagactgatggcacaacccgtgttttttgctagatggaacagcaagcaccggatcccgcaatgcgggcggcgctgcagagccagccgtccggcattaactcctcggacgattggacccaggccatgcaacgtatcatggcgttgacgactcgcaaccccgaagcctttagacagcaaccccaggccaaccgtctatcggccatcatggaagctgtagtgccttcccgatctaatcccactcatgagaaggtcctggccatcgtgaacgcgttggtggagaacaaagctattcgtccagatgaggccggactggtatacaacgctctcttagaacgcgtggctcgctacaacagtagcaatgtgcaaaccaatttggaccgtatgataacagatgtacgcgaagccgtgtctcagcgcgaaaggttccagcgtgatgccaacctgggttcgctggtggcgttaaatgctttcttgagtactcagcctgctaatgtgccgcgtggtcaacaggattatactaactttttaagtgctttgagactgatggtatcagaagtacctcagagcgaagtgtatcagtccggtcctgattacttctttcagactagcagacagggcttgcagacggtaaatctgagccaagcttttaaaaaccttaaaggtttgtggggagtgcatgccccggtaggagaaagagcaaccgtgtctagcttgttaactccgaactcccgcctgttattactgttggtagctcctttcaccgacagcggtagcatcgaccgtaattcctatttgggttacctactaaacctgtatcgcgaagccatagggcaaagtcaggtggacgagcagacctatcaagaaattacccaagtcagtcgcgctttgggacaggaagacactggcagtttggaagccactctgaacttcttgcttaccaatcggtctcaaaagatccctcctcaatatgctcttactgcggaggaggagaggatccttagatatgtgcagcagagcgtgggattgtttctgatgcaagagggggcaactccgactgcagcactggacatgacagcgcgaaatatggagcccagcatgtatgccagtaaccgacctttcattaacaaactgctggactacttgcacagagctgccgctatgaactctgattatttcaccaatgccatcttaaacccgcactggctgcccccacctggtttctacacgggcgaatatgacatgcccgaccctaatgacggatttctgtgggacgacgtggacagcgatgttttttcacctctttctgatcatcgcacgtggaaaaaggaaggcggtgatagaatgcattcttctgcatcgctgtccggggtcatgggtgctaccgcggctgagcccgagtctgcaagtccttttcctagtctacccttttctctacacagtgtacgtagcagcgaagtgggtagaataagtcgcccgagtttaatgggcgaagaggagtacctaaacgattccttgctcagaccggcaagagaaaaaaatttcccaaacaatggaatagaaagtttggtggataaaatgagtagatggaagacttatgctcaggatcacagagacgagcctgggatcatggggactacaagtagagcgagccgtagacgccagcgccatgacagacagaggggtcttgtgtgggacgatgaggattcggccgatgatagcagcgtgttggacttgggtgggagaggaaggggcaacccgtttgctcatttgcgccctcgcttgggtggtatgttgtgaaaaaaaataaaaaagaaaaactcaccaaggccatggcgacgagcgtacgttcgttcttctttattatctgtgtctagtataatgaggcgagtcgtgctaggcggagcggtggtgtatccggagggtcctcctccttcgtacgagagcgtgatgcagcagcagcaggcgacggcggtgatgcaatccccactggaggctccctttgtgcctccgcgatacctggcacctacggagggcagaaacagcattcgttactcggaactggcacctcagtacgataccaccaggttgtatctggtggacaacaagtcggcggacattgcttctctgaactatcagaatgaccacagcaacttcttgaccacggtggtgcagaacaatgactttacccctacggaagccagcacccagaccattaactttgatgaacgatcgcggtggggcggtcagctaaagaccatcatgcatactaacatgccaaacgtgaacgagtatatgtttagtaacaagttcaaagcgcgtgtgatggtgtccagaaaacctcccgacggtgctgcagttggggatacttatgatcacaagcaggatattttggaatatgagtggttcgagtttactttgccagaaggcaacttttcagttactatgactattgatttgatgaacaatgccatcatagataattacttgaaagtgggtagacagaatggagtgcttgaaagtgacattggtgttaagttcgacaccaggaacttcaagctgggatgggatcccgaaaccaagttgatcatgcctggagtgtatacgtatgaagccttccatcctgacattgtcttactgcctggctgcggagtggattttaccgagagtcgtttgagcaaccttcttggtatcagaaaaaaacagccatttcaagagggttttaagattttgtatgaagatttagaaggtggtaatattccggccctcttggatgtagatgcctatgagaacagtaagaaagaacaaaaagccaaaatagaagctgctacagctgctgcagaagctaaggcaaacatagttgccagcgactctacaagggttgctaacgctggagaggtcagaggagacaattttgcgccaacacctgttccgactgcagaatcattattggccgatgtgtctgaaggaacggacgtgaaactcactattcaacctgtagaaaaagatagtaagaatagaagctataatgtgttggaagacaaaatcaacacagcctatcgcagttggtatctttcgtacaattatggcgatcccgaaaaaggagtgcgttcctggacattgctcaccacctcagatgtcacctgcggagcagagcaggtttactggtcgcttccagacatgatgaaggatcctgtcactttccgctccactagacaagtcagtaactaccctgtggtgggtgcagagcttatgcccgtcttctcaaagagcttctacaacgaacaagctgtgtactcccagcagctccgccagtccacctcgcttacgcacgtcttcaaccgctttcctgagaaccagattttaatccgtccgccggcgcccaccattaccaccgtcagtgaaaacgttcctgctctcacagatcacgggaccctgccgttgcgcagcagtatccggggagtccaacgtgtgaccgttactgacgccagacgccgcacctgtccctacgtgtacaaggcactgggcatagtcgcaccgcgcgtcctttcaagccgcactttctaaaaaaaaaaaatgtccattcttatctcgcccagtaataacaccggttggggtctgcgcgctccaagcaagatgtacggaggcgcacgcaaacgttctacccaacatcccgtgcgtgttcgcggacattttcgcgctccatggggtgccctcaagggccgcactcgcgttcgaaccaccgtcgatgatgtaatcgatcaggtggttgccgacgcccgtaattatactcctactgcgcctacatctactgtggatgcagttattgacagtgtagtggctgacgctcgcaactatgctcgacgtaagagccggcgaaggcgcattgccagacgccaccgagctaccactgccatgcgagccgcaagagctctgctacgaagagctagacgcgtggggcgaagagccatgcttagggcggccagacgtgcagcttcgggcgccagcgccggcaggtcccgcaggcaagcagccgctgtcgcagcggcgactattgccgacatggcccaatcgcgaagaggcaatgtatactgggtgcgtgacgctgccaccggtcaacgtgtacccgtgcgcacccgtccccctcgcacttagaagatactgagcagtctccgatgttgtgtcccagcggcgaggatgtccaagcgcaaatacaaggaagaaatgctgcaggttatcgcacctgaagtctacggccaaccgttgaaggatgaaaaaaaaccccgcaaaatcaagcgggttaaaaaggacaaaaaagaagaggaagatggcgatgatgggctggcggagtttgtgcgcgagtttgccccacggcgacgcgtgcaatggcgtgggcgcaaagttcgacatgtgttgagacctggaacttcggtggtctttacacccggcgagcgttcaagcgctacttttaagcgttcctatgatgaggtgtacggggatgatgatattcttgagcaggcggctgaccgattaggcgagtttgcttatggcaagcgtagtagaataacttccaaggatgagacagtgtcaatacccttggatcatggaaatcccacccctagtcttaaaccggtcactttgcagcaagtgttacccgtaactccgcgaacaggtgttaaacgcgaaggtgaagatttgtatcccactatgcaactgatggtacccaaacgccagaagttggaggacgttttggagaaagtaaaagtggatccagatattcaacctgaggttaaagtgagacccattaagcaggtagcgcctggtctgggggtacaaactgtagacattaagattcccactgaaagtatggaagtgcaaactgaacccgcaaagcctactgccacctccactgaagtgcaaacggatccatggatgcccatgcctattacaactgacgccgccggtcccactcgaagatcccgacgaaagtacggtccagcaagtctgttgatgcccaattatgttgtacacccatctattattcctactcctggttaccgaggcactcgctactatcgcagccgaaacagtacctcccgccgtcgccgcaagacacctgcaaatcgcagtcgtcgccgtagacgcacaagcaaaccgactcccggcgccctggtgcggcaagtgtaccgcaatggtagtgcggaacctttgacactgccgcgtgcgcgttaccatccgagtatcatcacttaatcaatgttgccgctgcctccttgcagatatggccctcacttgtcgccttcgcgttcccatcactggttaccgaggaagaaactcgcgccgtagaagagggatgttgggacgcggaatgcgacgctacaggcgacggcgtgctatccgcaagcaattgcggggtggttttttaccagccttaattccaattatcgctgctgcaattggcgcgataccaggcatagcttccgtggcggttcaggcctcgcaacgacattgacattggaaaaaaaacgtataaataaaaaaaaatacaatggactctgacactcctggtcctgtgactatgttttcttagagatggaagacatcaatttttcatccttggctccgcgacacggcacgaagccgtacatgggcacctggagcgacatcggcacgagccaactgaacgggggcgccttcaattggagcagtatctggagcgggcttaaaaattttggctcaaccataaaaacatacgggaacaaagcttggaacagcagtacaggacaggcgcttagaaataaacttaaagaccagaacttccaacaaaaagtagtcgatgggatagcttccggcatcaatggagtggtagatttggctaaccaggctgtgcagaaaaagataaacagtcgtttggacccgccgccagcaaccccaggtgaaatgcaagtggaggaagaaattcctccgccagaaaaacgaggcgacaagcgtccgcgtcccgatttggaagagacgctggtgacgcgcgtagatgaaccgccttcttatgaggaagcaacgaagcttggaatgcccaccactagaccgatagccccaatggccaccggggtgatgaaaccttctcagttgcatcgacccgtcaccttggatttgccccctccccctgctgctactgctgtacccgcttctaagcctgtcgctgccccgaaaccagtcgccgtagccaggtcacgtcccgggggcgctcctcgtccaaatgcgcactggcaaaatactctgaacagcatcgtgggtctaggcgtgcaaagtgtaaaacgccgtcgctgcttttaattaaatatggagtagcgcttaacttgcctatctgtgtatatgtgtcattacacgccgtcacagcagcagaggaaaaaaggaagaggtcgtgcgtcgacgctgagttactttcaagatggccaccccatcgatgctgccccaatgggcatacatgcacatcgccggacaggatgcttcggagtacctgagtccgggtctggtgcagttcgcccgcgccacagacacctacttcaatctgggaaataagtttagaaatcccaccgtagcgccgacccacgatgtgaccaccgaccgtagccagcggctcatgttgcgcttcgtgcccgttgaccgggaggacaatacatactcttacaaagtgcggtacaccctggccgtgggcgacaacagagtgctggatatggccagcacgttctttgacattaggggcgtgttggacagaggtcccagtttcaaaccctattctggtacggcttacaactctctggctcctaaaggcgctccaaatgcatctcaatggattgcaaaaggcgtaccaactgcagcagccgcaggcaatggtgaagaagaacatgaaacagaggagaaaactgctacttacacttttgccaatgctcctgtaaaagccgaggctcaaattacaaaagagggcttaccaataggtttggagatttcagctgaaaacgaatctaaacccatctatgcagataaactttatcagccagaacctcaagtgggagatgaaacttggactgacctagacggaaaaaccgaagagtatggaggcagggctctaaagcctactactaacatgaaaccctgttacgggtcctatgcgaagcctactaatttaaaaggtggtcaggcaaaaccgaaaaactcggaaccgtcgagtgaaaaaattgaatatgatattgacatggaattttttgataactcatcgcaaagaacaaacttcagtcctaaaattgtcatgtatgcagaaaatgtaggtttggaaacgccagacactcatgtagtgtacaaacctggaacagaagacacaagttccgaagctaatttgggacaacagtctatgcccaacagacccaactacattggcttcagagataactttattggactcatgtactataacagtactggtaacatgggggtgctggctggtcaagcgtctcagttaaatgcagtggttgacttgcaggacagaaacacagaactttcttaccaactcttgcttgactctctgggcgacagaaccagatactttagcatgtggaatcaggctgtggacagttatgatcctgatgtacgtgttattgaaaatcatggtgtggaagatgaacttcccaactattgttttccactggacggcataggtgttccaacaaccagttacaaatcaatagttccaaatggagaagataataataattggaaagaacctgaagtaaatggaacaagtgagatcggacagggtaatttgtttgccatggaaattaaccttcaagccaatctatggcgaagtttcctttattccaatgtggctctgtatctcccagactcgtacaaatacaccccgtccaatgtcactcttccagaaaacaaaaacacctacgactacatgaacgggcgggtggtgccgccatctctagtagacacctatgtgaacattggtgccaggtggtctctggatgccatggacaatgtcaacccattcaaccaccaccgtaacgctggcttgcgttaccgatctatgcttctgggtaacggacgttatgtgcctttccacatacaagtgcctcaaaaattcttcgctgttaaaaacctgctgcttctcccaggctcctacacttatgagtggaactttaggaaggatgtgaacatggttctacagagttccctcggtaacgacctgcgggtagatggcgccagcatcagtttcacgagcatcaacctctatgctacttttttccccatggctcacaacaccgcttccacccttgaagccatgctgcggaatgacaccaatgatcagtcattcaacgactacctatctgcagctaacatgctctaccccattcctgccaatgcaaccaatattcccatttccattccttctcgcaactgggcggctttcagaggctggtcatttaccagactgaaaaccaaagaaactccctctttggggtctggatttgacccctactttgtctattctggttctattccctacctggatggtaccttctacctgaaccacacttttaagaaggtttccatcatgtttgactcttcagtgagctggcctggaaatgacaggttactatctcctaacgaatttgaaataaagcgcactgtggatggcgaaggctacaacgtagcccaatgcaacatgaccaaagactggttcttggtacagatgctcgccaactacaacatcggctatcagggcttctacattccagaaggatacaaagatcgcatgtattcatttttcagaaacttccagcccatgagcaggcaggtggttgatgaggtcaattacaaagacttcaaggccgtcgccataccctaccaacacaacaactctggctttgtgggttacatggctccgaccatgcgccaaggtcaaccctatcccgctaactatccctatccactcattggaacaactgccgtaaatagtgttacgcagaaaaagttcttgtgtgacagaaccatgtggcgcataccgttctcgagcaacttcatgtctatgggggcccttacagacttgggacagaatatgctctatgccaactcagctcatgctctggacatgacctttgaggtggatcccatggatgagcccaccctgctttatcttctcttcgaagttttcgacgtggtcagagtgcatcagccacaccgcggcatcatcgaggcagtctacctgcgtacaccgttctcggccggtaacgctaccacgtaagaagcttcttgcttcttgcaaatagcagctgcaaccatggcctgcggatcccaaaacggctccagcgagcaagagctcagagccattgtccaagacctgggttgcggaccctattttttgggaacctacgataagcgcttcccggggttcatggcccccgataagctcgcctgtgccattgtaaatacggccggacgtgagacggggggagagcactggttggctttcggttggaacccacgttctaacacctgctacctttttgatccttttggattctcggatgatcgtctcaaacagatttaccagtttgaatatgagggtctcctgcgccgcagcgctcttgctaccaaggaccgctgtattacgctggaaaaatctacccagaccgtgcagggcccccgttctgccgcctgcggacttttctgctgcatgttccttcacgcctttgtgcactggcctgaccgtcccatggacggaaaccccaccatgaaattgctaactggagtgccaaacaacatgcttcattctcctaaagtccagcccaccctgtgtgacaatcaaaaagcactctaccattttcttaatacccattcgccttattttcgctctcatcgtacacacatcgaaagggccactgcgttcgaccgtatggatgttcaataatgactcatgtaaacaacgtgttcaataaacatcactttatttttttacatgtatcaaggctctggattacttatttatttacaagtcgaatgggttctgacgagaatcagaatgacccgcaggcagtgatacgttgcggaactgatacttgggttgccacttgaattcgggaatcaccaacttgggaaccggtatatcgggcaggatgtcactccacagctttctggtcagctgcaaagctccaagcaggtcaggagccgaaatcttgaaatcacaattaggaccagtgctctgagcgcgagagttgcggtacaccggattgcagcactgaaacaccatcagcgacggatgtctcacgcttgccagcacggtgggatctgcaatcatgcccacatccagatcttcagcattggcaatgctgaacggggtcatcttgcaggtctgcctacccatggcgggcacccaattaggcttgtggttgcaatcgcagtgcagggggatcagtatcatcttggcctgatcctgtctgattcctggatacacggctctcatgaaagcatcatattgcttgaaagcctgctgggctttactaccctcggtataaaacatcccgcaggacctgctcgaaaactggttagctgcacagccggcatcattcacacagcagcgggcgtcattgttggctatttgcaccacacttctgccccagcggttttgggtgattttggttcgctcgggattctcctttaaggctcgttgtccgttctcgctggccacatccatctcgataatctgctccttctgaatcataatattgccatgcaggcacttcagcttgccctcataatcattgcagccatgaggccacaacgcacagcctgtacattcccaattatggtgggcgatctgagaaaaagaatgtatcattccctgcagaaatcttcccatcatcgtgctcagtgtcttgtgactagtgaaagttaactggatgcctcggtgctcttcgtttacgtactggtgacagatgcgcttgtattgttcgtgttgctcaggcattagtttaaaacaggttctaagttcgttatccagcctgtacttctccatcagcagacacatcacttccatgcctttctcccaagcagacaccaggggcaagctaatcggattcttaacagtgcaggcagcagctcctttagccagagggtcatctttagcgatcttctcaatgcttcttttgccatccttctcaacgatgcgcacgggcgggtagctgaaacccactgctacaagttgcgcctcttctctttcttcttcgctgtcttgactgatgtcttgcatggggatatgtttggtcttccttggcttctttttggggggtatcggaggaggaggactgtcgctccgttccggagacagggaggattgtgacgtttcgctcaccattaccaactgactgtcggtagaagaacctgaccccacacggcgacaggtgtttttcttcgggggcagaggtggaggcgattgcgaagggctgcggtccgacctggaaggcggatgactggcagaaccccttccgcgttcgggggtgtgctccctgtggcggtcgcttaactgatttccttcgcggctggccattgtgttctcctaggcagagaaacaacagacatggaaactcagccattgctgtcaacatcgccacgagtgccatcacatctcgtcctcagcgacgaggaaaaggagcagagcttaagcattccaccgcccagtcctgccaccacctctaccctagaagataaggaggtcgacgcatctcatgacatgcagaataaaaaagcgaaagagtctgagacagacatcgagcaagacccgggctatgtgacaccggtggaacacgaggaagagttgaaacgctttctagagagagaggatgaaaactgcccaaaacagcgagcagataactatcaccaagatgctggaaatagggatcagaacaccgactacctcatagggcttgacggggaagacgcgctccttaaacatctagcaagacagtcgctcatagtcaaggatgcattattggacagaactgaagtgcccatcagtgtggaagagctcagctgcgcctacgagcttaaccttttttcacctcgtactccccccaaacgtcagccaaacggcacctgcgagccaaatcctcgcttaaacttttatccagcttttgctgtgccagaagtactggctacctatcacatcttttttaaaaatcaaaaaattccagtctcctgccgcgctaatcgcacccgcgccgatgccctactcaatctgggacctggttcacgcttacctgatatagcttccttggaagaggttccaaagatcttcgagggtctgggcaataatgagactcgggccgcaaatgctctgcaaaagggagaaaatggcatggatgagcatcacagcgttctggtggaattggaaggcgataatgccagactcgcagtactcaagcgaagcgtcgaggtcacacacttcgcatatcccgctgtcaacctgccccctaaagtcatgacggcggtcatggaccagttactcattaagcgcgcaagtcccctttcagaagacatgcatgacccagatgcctgtgatgagggtaaaccagtggtcagtgatgagcagctaacccgatggctgggcaccgactctccccgggatttggaagagcgtcgcaagcttatgatggccgtggtgctggttaccgtagaactagagtgtctccgacgtttctttaccgattcagaaaccttgcgcaaactcgaagagaatctgcactacacttttagacacggctttgtgcggcaggcatgcaagatatctaacgtggaactcaccaacctggtttcctacatgggtattctgcatgagaatcgcctaggacaaagcgtgctgcacagcacccttaagggggaagcccgccgtgattacatccgcgattgtgtctatctctacctgtgccacacgtggcaaaccggcatgggtgtatggcagcaatgtttagaagaacagaacttgaaagagcttgacaagctcttacagaaatctcttaaggttctgtggacagggttcgacgagcgcaccgtcgcttccgacctggcagacctcatcttcccagagcgtctcagggttactttgcgaaacggattgcctgactttatgagccagagcatgcttaacaattttcgctctttcatcctggaacgctccggtatcctgcccgccacctgctgcgcactgccctccgactttgtgcctctcacctaccgcgagtgccccccgccgctatggagtcactgctacctgttccgtctggccaactatctctcctaccactcggatgtgatcgaggatgtgagcggagacggcttgctggagtgccactgccgctgcaatctgtgcacgccccaccggtccctagcttgcaacccccagttgatgagcgaaacccagataataggcacctttgaattgcaaggccccagcagccaaggcgatgggtcttctcctgggcaaagtttaaaactgaccccgggactgtggacctccgcctacttgcgcaagtttgctccggaagattaccacccctatgaaatcaagttctatgaggaccaatcacagcctccaaaggccgaactttcggcttgcgtcatcacccagggggcaattctggcccaattgcaagccatccaaaaatcccgccaagaatttctactgaaaaagggtaagggggtctaccttgacccccagaccggcgaggaactcaacacaaggttccctcaggatgtcccaacgacgagaaaacaagaagttgaaggtgcagccgccgcccccagaagatatggaggaagattgggacagtcaggcagaggaggcggaggaggacagtctggaggacagtctggaggaagacagtttggaggaggaaaacgaggaggcagaggaggtggaagaagtaaccgccgacaaacagttatcctcggctgcggagacaagcaacagcgctaccatctccgctccgagtcgaggaacccggcggcgtcccagcagtagatgggacgagaccggacgcttcccgaacccaaccagcgcttccaagaccggtaagaaggatcggcagggatacaagtcctggcgggggcataagaatgccatcatctcctgcttgcatgagtgcgggggcaacatatccttcacgcggcgctacttgctattccaccatggggtgaactttccgcgcaatgttttgcattactaccgtcacctccacagcccctactatagccagcaaatcccgacagtctcgacagataaagacagcggcggcgacctccaacagaaaaccagcagcggcagttagaaaatacacaacaagtgcagcaacaggaggattaaagattacagccaacgagccagcgcaaacccgagagttaagaaatcggatctttccaaccctgtatgccatcttccagcagagtcggggtcaagagcaggaactgaaaataaaaaaccgatctctgcgttcgctcaccagaagttgtttgtatcacaagagcgaagatcaacttcagcgcactctcgaggacgccgaggctctcttcaacaagtactgcgcgctgactcttaaagagtaggcagcgaccgcgcttattcaaaaaaggcgggaattacatcatcctcgacatgagtaaagaaattcccacgccttacatgtggagttatcaaccccaaatgggattggcagcaggcgcctcccaggactactccacccgcatgaattggctcagcgccgggccttctatgatttctcgagttaatgatatacgcgcctaccgaaaccaaatacttttggaacagtcagctcttaccaccacgccccgccaacaccttaatcccagaaattggcccgccgccctagtgtaccaggaaagtcccgctcccaccactgtattacttcctcgagacgcccaggccgaagtccaaatgactaatgcaggtgcgcagttagctggcggctccaccctatgtcgtcacaggcctcggcataatataaaacgcctgatgatcagaggccgaggtatccagctcaacgacgagtcggtgagctctccgcttggtctacgaccagacggaatctttcagattgccggctgcgggagatcttccttcacccctcgtcaggctgttctgactttggaaagttcgtcttcgcaaccccgctcgggcggaatcgggaccgttcaatttgtagaggagtttactccctctgtctacttcaaccccttctccggatctcctgggcactacccggacgagttcataccgaacttcgacgcgattagcgagtcagtggacggctacgattgatgtctggtgacgcggctgagctatctcggctgcgacatctagaccactgccgccgctttcgctgctttgcccgggaacttattgagttcatctacttcgaactccccaaggatcaccctcaaggtccggcccacggagtgcggattactatcgaaggcaaaatagactctcgcctgcaacgaattttctcccagcggcccgtgctgatcgagcgagaccagggaaacaccacggtttccatctactgcatttgtaatcaccccggattgcatgaaagcctttgctgtcttatgtgtactgagtttaataaaaactgaattaagactctcctacggactgccgcttcttcaacccggattttacaaccagaagaacaaaacttttcctgtcgtccaggactctgttaacttcacctttcctactcacaaactagaagctcaacgactacaccgcttttccagaagcattttccctactaatactactttcaaaaccggaggtgagctccacggtctccctacagaaaacccttgggtggaagcgggccttgtagtactaggaattcttgcgggtgggcttgtgattattctttgctacctatacacaccttgcttcactttcctagtggtgttgtggtattggtttaaaaaatggggcccatactagtcttgcttgttttactttcgcttttggaaccgggttctgccaattacgatccatgtctagactttgacccagaaaactgcacacttacttttgcacccgacacaagccgcatctgtggagttcttattaagtgcggatgggaatgcaggtccgttgaaattacacacaataacaaaacctggaacaataccttatccaccacatgggagccaggagttcccgagtggtacactgtctctgtccgaggtcctgacggttccatccgcattagtaacaacactttcattttttctgaaatgtgcgatctggccatgttcatgagcaaacagtattctctatggcctcctagcaaggacaacatcgtaacgttctccattgcttattgcttgtgcgcttgccttcttactgctttactgtgcgtatgcatacacctgcttgtaaccactcgcatcaaaaacgccaataacaaagaaaaaatgccttaacctctttctgtttacagacatggcttctcttacatctctcatatttgtcagcattgtcactgccgctcacggacaaacagtcgtctctatcccactaggacataattacactctcataggacccccaatcacttcagaggtcatctggaccaaactgggaagcgttgattactttgatataatctgtaacaaaacaaaaccaataatagtaacttgcaacatacaaaatcttacattgattaatgttagcaaagtttacagcggttactattatggttatgacagatacagtagtcaatatagaaattacttggttcgtgttacccagttgaaaaccacgaaaatgccaaatatggcaaagattcgatccgatgacaattctctagaaacttttacatctcccaccacacccgacgaaaaaaacatcccagattcaatgattgcaattgttgcagcggtggcagtggtgatggcactaataataatatgcatgcttttatatgcttgtcgctacaaaaagtttcatcctaaaaaacaagatctcctactaaggcttaacatttaatttctttttatacagccatggtttccactaccacattccttatgcttactagtctcgcaactctgacttctgctcgctcacacctcactgtaactataggctcaaactgcacactaaaaggacctcaaggtggtcatgtcttttggtggagaatatatgacaatggatggtttacaaaaccatgtgaccaacctggtagatttttctgcaacggcagagacctaaccattatcaacgtgacagcaaatgacaaaggcttctattatggaaccgactataaaagtagtttagattataacattattgtactgccatctaccactccagcaccccgcacaactactttctctagcagcagtgtcgctaacaatacaatttccaatccaacctttgccgcgcttttaaaacgcactgtgaataattctacaacttcacatacaacaatttccacttcaacaatcagcatcatcgctgcagtgacaattggaatatctattcttgtttttaccataacctactacgcctgctgctatagaaaagacaaacataaaggtgatccattacttagatttgatatttaatttgttctttttttttatttacagtatggtgaacaccaatcatggtacctagaaatttcttcttcaccatactcatctgtgcttttaatgtttgcgctactttcacagcagtagccacagcaaccccagactgtataggagcatttgcttcctatgcactttttgcttttgttacttgcatctgcgtatgtagcatagtctgcctggttattaattttttccaacttctagactggatccttgtgcgaattgcctacctgcgccaccatcccgaataccgcaaccaaaatatcgcggcacttcttagactcatctaaaaccatgcaggctatactaccaatatttttgcttctattgcttccctacgctgtctcaaccccagctgcctatagtactccaccagaacaccttagaaaatgcaaattccaacaaccgtggtcatttcttgcttgctatcgagaaaaatcagaaatccccccaaatttaataatgattgctggaataattaatataatctgttgcaccataatttcatttttgatataccccctatttgattttggctggaatgctcccaatgcacatgatcatccacaagacccagaggaacacattcccccacaaaacatgcaacatccaatagcgctaatagattacgaaagtgaaccacaacccccactactccctgctattagttacttcaacctaaccggcggagatgactgaaacactcaccacctccaattccgccgaggatctgctcgatatggacggccgcgtctcagaacaacgacttgcccaactacgcatccgccagcagcaggaacgcgtggccaaagagctcagagatgtcatccaaattcaccaatgcaaaaaaggcatattctgtttggtaaaacaagccaagatatcctacgagatcaccgctactgaccatcgcctctcttacgaacttggcccccaacgacaaaaatttacctgcatggtgggaatcaaccccatagttatcacccaacaaagtggagatactaagggttgcattcactgctcctgcgattccatcgagtgcacctacaccctgctgaagaccctatgcggcctaagagacctgctaccaatgaattaaaaaaaaatgattaataaaaaatcacttacttgaaatcagcaataaggtctctgttgaaattttctcccagcagcacctcacttccctcttcccaactctggtattctaaaccccgttcagcggcatactttctccatactttaaaggggatgtcaaattttagctcctctcctgtacccacaatcttcatgtctttcttcccagatgaccaagagagtccggctcagtgactccttcaaccctgtctacccctatgaagatgaaagcacctcccaacacccctttataaacccagggtttatttccccaaatggcttcacacaaagcccagacggagttcttactttaaaatgtttaaccccactaacaaccacaggcggatctctacagctaaaagtgggagggggacttacagtggatgacactgatggtaccttacaagaaaacatacgtgctacagcacccattactaaaaataatcactctgtagaactatccattggaaatggattagaaactcaaaacaataaactatgtgccaaattgggaaatgggttaaaatttaacaacggtgacatttgtataaaggatagtattaacaccttatggactggaataaaccctccacctaactgtcaaattgtggaaaacactaatacaaatgatggcaaacttactttagtattagtaaaaaatggagggcttgttaatggctacgtgtctctagttggtgtatcagacactgtgaaccaaatgttcacacaaaagacagcaaacatccaattaagattatattttgactcttctggaaatctattaactgaggaatcagacttaaaaattccacttaaaaataaatcttctacagcgaccagtgaaactgtagccagcagcaaagcctttatgccaagtactacagcttatcccttcaacaccactactagggatagtgaaaactacattcatggaatatgttactacatgactagttatgatagaagtctatttcccttgaacatttctataatgctaaacagccgtatgatttcttccaatgttgcctatgccatacaatttgaatggaatctaaatgcaagtgaatctccagaaagcaacatagctacgctgaccacatccccctttttcttttcttacattacagaagacgacaactaaaataaagtttaagtgtttttatttaaaatcacaaaattcgagtagttattttgcctccaccttcccatttgacagaatacaccaatctctccccacgcacagctttaaacatttggataccattagagatagacattgttttagattccacattccaaacagtttcagagcgagccaatctggggtcagtgatagataaaaatccatcgcgatagtcttttaaagcgctttcacagtccaactgctgcggatgcgactccggagtttggatcacggtcatctggaagaagaacgatgggaatcataatccgaaaacggtatcggacgattgtgtctcatcaaacccacaagcagccgctgtctgcgtcgctccgtgcgactgctgtttatgggatcagggtccacagtttcctgaagcatgattttaatagcccttaacatcaactttctggtgcgatgcgcgcagcaacgcattctgatttcactcaaatctttgcagtaggtacaacacattattacaatattgtttaataaaccataattaaaagcgctccagccaaaactcatatctgatataatcgcccctgcatgaccatcataccaaagtttaatataaattaaatgacgttccctcaaaaacacactacccacatacatgatctcttttggcatgtgcatattaacaatctgtctgtaccatggacaacgttggttaatcatgcaacccaatataaccttccggaaccacactgccaacaccgctcccccagccatgcattgaagtgaaccctgctgattacaatgacaatgaagaacccaattctctcgaccgtgaatcacttgagaatgaaaaatatctatagtggcacaacatagacataaatgcatgcatcttctcataatttttaactcctcaggatttagaaacatatcccagggaataggaagctcttgcagaacagtaaagctggcagaacaaggaagaccacgaacacaacttacactatgcatagtcatagtatcacaatctggcaacagcgggtggtcttcagtcatagaagctcgggtttcattttcctcacaacgtggtaactgggctctggtgtaagggtgatgtctggcgcatgatgtcgagcgtgcgcgcaaccttgtcataatggagttgcttcctgacattctcgtattttgtatagcaaaacgcggccctggcagaacacactcttcttcgccttctatcctgccgcttagcgtgttccgtgtgatagttcaagtacagccacactcttaagttggtcaaaagaatgctggcttcagttgtaatcaaaactccatcgcatctaattgttctgaggaaatcatccacggtagcatatgcaaatcccaaccaagcaatgcaactggattgcgtttcaagcaggagaggagagggaagagacggaagaaccatgttaatttttattccaaacgatctcgcagtacttcaaattgtagatcgcgcagatggcatctctcgcccccactgtgttggtgaaaaagcacagctaaatcaaaagaaatgcgattttcaaggtgctcaacggtggcttccaacaaagcctccacgcgcacatccaagaacaaaagaataccaaaagaaggagcattttctaactcctcaatcatcatattacattcctgcaccattcccagataattttcagctttccagccttgaattattcgtgtcagttcttgtggtaaatccaatccacacattacaaacaggtcccggagggcgccctccaccaccattcttaaacacaccctcataatgacaaaatatcttgctcctgtgtcacctgtagcgaattgagaatggcaacatcaattgacatgcccttggctctaagttcttctttaagttctagttgtaaaaactctctcatattatcaccaaactgcttagccagaagccccccgggaacaagagcaggggacgctacagtgcagtacaagcgcagacctccccaattggctccagcaaaaacaagattggaataagcatattgggaaccaccagtaatatcatcgaagttgctggaaatataatcaggcagagtttcttgtagaaattgaataaaagaaaaatttgccaaaaaaacattcaaaacctctgggatgcaaatgcaataggttaccgcgctgcgctccaacattgttagttttgaattagtctgcaaaaataaaaaaaaaacaagcgtcatatcatagtagcctgacgaacaggtggataaatcagtctttccatcacaagacaagccacagggtctccagctcgaccctcgtaaaacctgtcatcgtgattaaacaacagcaccgaaagttcctcgcggtgaccagcatgaataagtcttgatgaagcatacaatccagacatgttagcatcagttaaggagaaaaaacagccaacatagcctttgggtataattatgcttaatcgtaagtatagcaaagccacccctcgcggatacaaagtaaaaggcacaggagaataaaaaatataattatttctctgctgctgtttaggcaacgtcgcccccggtccctctaaatacacatacaaagcctcatcagccatggcttaccagagaaagtacagcgggcacacaaaccacaagctctaaagtcactctccaacctstccacaatatatatacacaagccctaaactgacgtaatgggactaaagtgtaaaaaatcccgccaaacccaacacacaccccgaaactgcgtcaccagggaaaagtacagtttcacttccgcaatcccaacaagcgtcacttcctctttctcacggtacgtcacatcccattaacttacaacgtcattttcccacggccgcgccgccccttttaaccgttaaccccacagccaatcaccacacggcccacactttttaaaatcacctcatttacatattggcaccattccatctataaggtatattattgatgatg

SEQ ID NO: 90 - DNA, 43058 bp, Homo sapiens
  misc_feature 1..43058: note = Homo sapiens, GenBank Accession No. Z84721
  source 1..43058: mol_type = genomic DNA
gatcacgccattgcactccaccctgggcgacagagcgacgagaccccgtatcaaaaaaaaaaaaaagaaagaaagaaagaaaaaagaaaaaaaaaaggccgggcgcggtggctcacgcctgtaatcccagcactttgggaggccgaggcgggtgaatcacgaggtcaggagttcgagaccatcctggccaacatggtgaaaccccgtctctacaaaaaaaaaaaaaaaaattagccgggcgtggtggcgggcgcctgtaatcccagctactcgggaggctgagacaggaaaatcgcttgaacccgggaggcggagcttgcggtgagccgagattgcgccactgcactacagcctaggcgacagagcgagactccgtctcaaaaaaaaaaaaaaaaaaaaaaaacacttggaagccgacaggagatctttgagaccttgggcgaggcagtgacactaaaggcaggagcgactacagaagaataaattaaacttcatcagattaaaaactttactgcggccgggcgcggtggctcacgcctgaaatcccagcactttgggaggccgaggtgggcagatcatgagatcaggagatctagaccatcctggccaacatggtaaaaccccgtctctctactaaaaatacaaaaattagctgggtttggcggcgcctgcttctaatcccagctactcgggaggctgaggcaggagaatcgcttgaagccgggaggcggaggttgcagtgagccgagatcgtgccactgaactctggcctggcgacagagcgagactccatctcaaaacaaaacaaaaacttcggtgctttaaaggacaccatcaagaaaattaaaagtccacccacagaacgggagaaaatatttgtaagttacatatctgataagggaattgtatctagaatggaggaaacttacaactcaacaataaaaagacaattgaaaaatgcacaaaggatatgaatatttttccagtgcattatgcaaatggccaataagcaccagaagatgctcagctcaactggtagaggcttacgcctgtgaccccagcgctgagaggccaggaactccagaccagcctgggcaaaacagaaattaaaaatgctcaacattattaggcattagggagatgcaaatcaaaactacaaatagatgccacatcacacctcctacgatggctgtaatcaaaaagacaagcgtcagcaggggtgtggagaaacgggaatctctctcctgctggtgggaatgtaagaggctacactcgctatggaaaacaggctggcagttcctgaaaggttagagttaacacaacactcggcaaatcccccttttagatatatagccaagagaaatgaaagcatatgtccacacaaaaacatgtgtgttcttagtaatattattcataatagcccaaagtggaagcaatcctagggtatatcaattgatgaatgggtgaatatggtatagtttgtttaagggaatactattcagccataaaaaggaatgaagtacggcacatgaatccatcttgaagacacactaatatatgattccatttatataagatgcccagaataggcaaatccatagagacagaatgattagtggctgcctagggcttccagggggtcaggggaaatatggagcgattcatgggttttttgaaggggagtgatgaaaatgttctaacgttgactgtggtaatggttggacagctctgagaacgcgaatacactaaaagacatggaagtgccgggcgcagtggctcatgcctgtaatcccagcgctttgggaggccaaggcaggcggatcgcgaggtcaggagatcgagaccatcctggctaagacagtgaaaccccgtgtctactaaaaatacaaaaaattagctggacatggtgcgggcgcctgtagtcccagatactcaggaggctgaggcaggagaatggtgtgaacccgggaggcggagcttgcagtgagccaagatcgcaccattgcactccagcctgggcgacagagcgagactccatctcaaaaacaaaaaaaagatatggaagtgtacacttgaagtggataagctttatggtatgcaaattggtatggtatggtaaattatatctcaatgaagttgttttttaaaaaatcaccccacctaccctatcccaggcttccccaggaggtaactaaaggtaatgagcttctttggctgcttccagaactttcccaagcacatcaaatgcatcagaacctaaccacttgactgagggatgagcattttcactgttgcaagtaaccctcttgcaccaacactgacactaatgtgtattttgcagaacaaatttgtggattggcctcaccagggtgaagggtacgtgcatttgaaatggctcaacagtaccaacaggtgcgttttcttgcacagggctgcataacattttttttttttttttgagacagagtctcgctctatcacccaggctggagggcagtggcacaatctcagttcactgcaagctccacctaccaggttcacatcattctcctgcctcagcctcccaagtagctgggactacaggtgcccgccaccacaccaggctaattttttttttttttttgagatggagtcttgctctgtcgcccaggctggagtgcagtggcacgatctcagctcactgcaagctccacctcccaggttcacaccattctcctgcctcagcctccccagtagctgagactacaggcgcccgccaccacgtccggctaatttttttgtatttttagtagagacggggtttcaccgcgttagccaggatggtctcgatctcctgacctcttgatccacccgcctcggcctctcaaagtgctgggattacaggcgtgagccaccgtgcccggcctgcataacatttttttttttcctgaaattcccagaaaggaaaatggtgtcttgttctatgttgcatttctttgattgagagggagagctgcatcacttaattatttgcagagaattgcttttcttgttttctttacaggtggtctgttcttggatggtctggctgtgttctttctgaggaatacataacctctgctacacattttgcaaggctttatccccgttgtccatgttttgattttatgtataatcaaaaggtttgtgagttctcccgcacttcccaggagtgcctctgggatggaaatgagactgcaggagcagggcttgaggctggaggggtgagatgggacagatgggggtgggggaacccagggcagtggccggtggtggtaatggaggcctcctcacagggaccctcacagcgaccatgcgaatggagcaggactgtgactcaggtctcgctcttctgacctaatcgtgctgctgccccaatgggcagaaccttggggctccagactggacatctctgggctcaaaggatcccactgttcccccggttaccctctcagggttggcctcctgccagtaaccctggcactcattgttcattcttctgactatcgtcagtcataatgagagctcgaactggtgaaagtgcagggagctcaccatgaccccagcccacagaggtcctgggtgcgtccctgccctcgaagcagcactctggatcccagcgccaccctcatgtccatgtttgcacctcattggctgtgacagaaatgagacatcattgtcacacgctggcctgagggtcagtgggccttgctttggacctcagtttccccaccagtaacagggttcagagcagatggtccctgagtgagtcccagctctaagttctcccagggtctcctggacaatgaagcaccagggccaacctccatttgctacaggggacatcctcaggctcttctctgctaagaccccacacctccaagtctcctcattttacctttaaatagctgtttcatgacctgcttttttgacggtaagtagatttttggaaactgaaacccctgacccttcctcccagcctgggcctgcccttggcaggataggaggccttatcggtcctgccacttggtctgggcctcaaagggccaccgccatctgcaggagggccgggtggggttcacagacgctatctgggacttgcctggacacctccaccttctcagctgagtgttgctgccccaccagggagaaccactcacacacagtagtaatagaaataatttaaaattcatgctgcaagttcctgagcgccctcccaacactgaggtgggggctagtctaatccccatcctagaggtgaaaacagtgaaactaggactcacaaggcaaattagcctgttcagggtcaccgagggtccactctcatgggagagtttgcagatgcccaatccggcattctgctgagtgtccagtggcttgtaagtggccagacaccctttgagctcagcctcagctgctcaggcacagaacgtgcctggagcttggaattcaggccagaaaccaccagtggacaccagcattccacactcactgcacaggctggggctcaaaccaaggcccagggacaggaagggacaagccccagccccagccggactcccagcccacacaaaccatcagggcttgtttcctgctccatggaagcctcagacatgtttcataacctcctggagcctccgtttccttatctttccaatgtaatgatgcccatgtgcagtggctcacgcctgtaatcccaagcactttaggaggccgaggtgggtggatcactggagctcaggagtttgaggccagcctgggcaacatggcaaaacgccatctctactaaaaacacaaatattacccaggcatagtggcacatgcctatagtcccagctactcaggaggctgaggtgggaggatcacctgagcttgggaagttgagcctgcagtgagccaagattgtcacactgcactctagcctggaggacagagtaagaagaccctgtaacaaaacaaaacataacaaaacaaacaaacaaaaaacccaactaatgacaataaaataaaccctccctcacagggtggttgtgaggataaagcacccagaatgaagagtgttgctgccatgtgcagaacttagaaagtgctcaacagatgccagccaaacagacatggactcccctcaacacagtcaacccaaggttgactgtcaccaaacgcaaaagaccacactgtaaagcttttagaaatgtggtctagtggccgggcactgtggctcatgcctgtaatctcagcactttggaaggctgaggcgggcggatcacagggtcaggagttcgagaccagcctgaccacctgaccaacgtggtaaaaccccgtctctactaaagattcaaaaaattagccgggtgtagtgctacgtgcctgtaatcccagctgctcgggaggctgaggcaggagaatcgcttgaacccaggaggcggaggtacagtgagctgagatcgcgccattgcactccagcctgggagacagagagagactccgtctcaaaaaaaaaaaaaaaaaaaaagttagccgggtggtagtggcatgtacctgtaatcccagctacttgggaggctgaggtaggagaatcgcttgagcctgggaggtagagggttgcggtgagccaagatggcgccactgcactccaatctgggcgagacactgagaccctgtctcaaaaaaaaaaaaaaaatgtggtctaggagactctcttcactttgagataaaatttgcatcacgtaaagataaccattttaacgagagcaagtcaacggcattcagcacattcagagtgttgtgcaacaaccacttctccctggttccaggacattttcatcgcctcagatggaaacgccctcctcacggaggcatctctcccggcctttgtcctccccggccctgacaaccactaatctactttctgctgggatttgcccattctggatgtttcctaaaaatggcttatctaagccccacagtttcatgcagcacgtagcctctggtgtgtgacgtccttcacttggtgtaatggttcgaggcttgtccatgtcgtagcctgggtcagaacttcattttcatggctgaataatatctcacggtgtggaaatatcacagtttgcttatctgttcatccagtgatggacatttgggttgtttctaccttttggctattgggaatggaagggataacattttttaattggatttttaaagtcactagtttgactgcattaaaattacaaacttttgtttaacgagaatatcactaagatacagagttggggagatctaacacataaaagtgacaaaggaattatatccagaatatttttgaaatttctacaaatcagtgactggcaacacagtgggaaagtggccaagactaaaatactttaataaagaggaaaccgaaatggccagtaaatatgggctcaacctcactaattatcaggaaaatgtaaattaagaccacaagagaaaccactacacactcaccaaaaatcacacacccaataaaaaggtaatttttttttttttttgagatgaagtctcactctattgcccaggctggagtacaatggcgcgatcttggctcactgcaacctccgcctcctgggttcaagcgattctcctgcctcagcctcctgagtacctgggattacaggcgcacaccaccacacccagctaattttgcatttttaagtagagacggggtttcaccatgtgggcaaggctagtctcgaactcctgacctcgtgatctgcccgccttggcctcccaaagtgctgagattacaggcatcagccactgtgcccggcctaaaaaaggctaaaatttaagaagaccaggagtttgactgctatggttggaatgtttgtctcctctaaaactcttgttgaaacttaatccccagtgtggcagcgttgagaggtggggcctttggggtaaggaggttggatcatgagggtcctcccccaaggaatggattaatgagttgtcatgggagtgtggctggtggctttataagaagagagacctggccgggcacggtggctgacacctgtaatcccagcactttgtgaggccgagatgggcggatcacaaggtcaggggatcgagaccatcctggctaacacagtgaaaccctgtctctactaaaaaaaaaatgcaaaaaaattagccgggcgtggtggcgggcacctgtagtcccagctactaggaaggctgaggcaggagaatggcgtgaacctgggaggcggagcttgcagtgagccgagatcgcgccactgccctccagcctgggcgacagagcaagactctgtctcaaaaaaaaaaagaagagagatctgaggtggcacacaagcatgctcagcccacacgacctgcgattaatactctgtgccactttgggactctgcacgagtccccactgggctcgaaacttctcagcctccgtaactataggaaataaattccttttaaaataaattccacagtctcaggtattctattataagcaacagaaaatggagtactacaccgatcatatcaaatgtttagaaggatttggagcaaggagaatgctcgcacaccactagggaaaacataagttggttaaccactgtgaaaaagtttggcattctttactaaagttgaaaatctatatgccctatgacccagcaactttactcctaggtatgtatgtacaaaatagaatttcaggcatgtgggtaccaggtgacatgtaaaggaatgtttattgcagcattattcataatagccaagaactaaacaacacaaagttccagccccagtacaatgaataaactgtggtatattcctacaaggaaatattaatagatacagcaatgaaaatgaacacatataacatggctggtaaatctgacatgagagagtgaaagaagatggacattcagtgtgcagacagttggattaaaaatatttttttaaaggccaggcttggtggctcacatctataatcctagcacttacagaggccaaggcgggcagatcacctgaggtcaggagttcaggaccagcctggctaacacagtgaaaccccatctctactagaaaatacaaaaattagccaggtgtggtggtgcatgcctgtagtcccaactactcgggaggctgaggcaggagaatcacttgaacctaggaggcggaggttgcagtgagccaagatcgcatcactgtactccatcctgggtgacagagcaagactgcgtctcgaaaataaatagataaataaataaataaccaacaggccgggagcagtggctcatgcctgtaatcccagcactttgggaggctgaggtgggcagatcacgaggtcaggagatcaagaccatcctggctaacacagtgaaaccctgtctctactgaaaatacaaaaaaattagccgggcatggtggcgggcgcctgtagtcccagctactcaggaggctgaggcaggagaatggcatgaacccgggaggtggagcttgcagtgagccgagatcatgccactgcactccagcctgagcgacagagcgagactccatctcaaaaaaataataattaaaaataaataaattaaataaataaataacagattgcataaagtggctcatgcctgtaatccaagcactttgggaggccaaggcagaaggatcacttgagcccaggagttcaggacaagcctgagcaacatggtgaaaccccacctctacaaaaaaaaaaaaaaaattagctgggcatggtggcatgtgcctgtgatcccagctacttgggaggctgaggcaggaggatcacttaagcctgggaggtcgaggctgcaatgagctatgatcgtaccactgcactccagcctgggcaatagagcaagaccctgtctcaaaacaaataaacaaaagccagacagacacaaatgagagcattctgtatcgtttcatttctatgaaggtgaaaagcaggcaaaaacaaccaaagtgcttgcagatgcatatctgagtagttaaaaacttactgaaaagcaggcctggctcacgcctttaatcccagcactttgggaagcgggcggatcacgaggtcaggagatcgagaccatcctggctaacacggtgaaaccccgtctctactaaaaatataaaaaattagccaggtatggtggctagtgcctgtggtcccagctactcgagaggctgaggcaggagaatggcatgaatccgggaggtggagcttgcagtgagctaagatcgtgcaactgcactccagcctgggcagcagagcgagactccctctcaaaaaaaaaaaaacttactgaaaagcaagaagtcaggtggaggttacctttggggaggattggggtgctgtccgctttctaataattcgttaaactatagtctacatcttgtgctatatttcacaatggaaaaacagaaaagagctcctgcccataacgctgctttgcaggtttggaaatttcagattcaattcctctccttgcgggggccaaggatgggaagagcaggtggttccagtagggaaagaggaggccctggggcctcaaaatggctaaggaccattcctcagcgtgggtggcacctaccctggaaacaggactctacttcctcctctgttagggggcagagcagccctgcagtgccttctgggcacaggtcctcactctgcagctggaggaattctcccaggcactgagagcccttcacggcccaaatgccccgtgcgctcggcctctggacttgccttccctgctctgtatatctccctccgcctgaccctcagcctcctccatcactcactgtcttctctgccagtctattcatctgtctctgtccctctctctgccaccttctctcctattgagaagccgaaacctcaggcacagacccacatcccctcctcatgggcccatgtgcccaaggtgcccctaggtgccaggctgagatgaaccaggagtgtccttctgaacccagcaacagcgaagggtgaccagggagggccagttcatctcggtctgaaagaagccccagatgagcaaaggatacactggcctcctgcggtcagcagcacttcccaggacagtgagcaagacaggggtaaggccagagtgggtgggcacacccatgggagagaggagccgctgtgaaatgtgcacgaggaacagaccagcaaggaggatccacgcagtgctagaagggagttcctggaagcctggtggagagcccctcccatctgctaagcccggagggcatcaaaggctgctgctgccctcaacccctgacaatctcatcatctcatatctcaggcatggaagaatgagggccattacacgagtaaaacatcaagtacactccagcctggatgacagggccaggctccatctcaaaaaaaaatgcctgtggtcaaagctctcctgacaggggaaaacaaaacaaaacaaacttctccttaaagaaaacatttgcctttgactgcatcataattccagcaggattttgtgcagataactctttggctaactctaaaattaatacagaaaggtaaagaaattagaatagccaaagaaattttgaaaaggaagaataaagcgagaggaatcacattcctcaatttttaacagctctattgagataaaattcacataccatacggttcacccatttaaagtgtataattcaggccgggcgcggtggctcacgcctgtaatcccagcactttgggaggctgaagcgggcagatcacctgaggtcgggaattcgagaccagtctgaccaacatggagaaaccccgtctctactaaaaatacaaaattagccaggcgtggtggctcatgcctgtactcccagctactcggaagactgaggcaagagaattgcttgaacccgggagacggaggttgccatgagccgagatcgcgccaccacacccagctgccattttttaattgattacttgtctatttattactgagttgtaagatattttgggccaagcacggtggctaacgcctgtaatcccagcactttaggaggctatggtgggcaaatcacttgaggtcaggagttcgagaccaggctggccaacatggcaaaacaccatctctactaaaaatacaaaaaaattagccaggtgtggccaggcgtggtgactcacgcctgtaatcccagcactttgggaggccaaggcgggtggatcacctgaggtcgggggctcaagaccagcctgaccaacatggagaaaccccgactccgctaaaaatacaaaattagccgggtgtggtggtgcatgcctgtaatcccagctactcacgaagctgaggcaggagaatggcttgagcccaggaggcagaggttgtggtgagctgagatcatgccattgtactccagcctgggcgacaagagcgaaattctgtcacaaaaaaaaaaaaaccattagccagccatggtgatgcacacccgtggtcccagctactcaggaggctgaggtatgagaattgcttgaacccaggaggcagaggttgcagcgagccaggattacgccgctgcactccagtctgggtgacagagcaagactctgtctaaaaaaaaaacaaaaacaaaaaagatattttgtatgtgtttggataacttccctatcagatatatgatttgcaaatatgtttctctcattctgtgagacatcattcaattttaagacatcacagagctatgttaatcaaggcactgtggctgtggtaaaggatagacacacagaacagaacagagagcccagaaatggacccgcaaacctatgccccattcattttttacaaataagtgcgagaagccaactgaatagaaagcgtatagctttttcaaaaaacagtgctggaacaattggacatctgtaggcaaaaaaacaaacaagcaaacagaagaatctggacctgcccttcacacctcagacaaaagtcatctcaaaatggattgtagatctcaatataaacataaactatacaactttagaagaaaatataggtgaaactctttgtgttctgtggttaggcagacagttcctaggcatggcactaagtaagattcatttaaaattttttgacaaattggactttattaaaacttttgctctacaaaagacaatattaagagaatgaactaacaagctacaaactaagagaaaacatttgcaaattgcatatctgacaagggattgcttccagacgatacacagaattctaaaaattcatccttaagagaataaaccacccaatttttaaatgggcaaaacaggccaggcgtggtggtgcacgcctgtaatcctagcactttgggaggccgaggcaggcggatcacaaggtcaggagattgagaccatcctagctaacacggtgaaaccctgtctctactaaaaatacaaaaaattagccaggcatggtggcaggtgcctgtagtcccagctactcgggaggctgaggcaggagaatggcgtgaacctgggaggcggagcttgcagtgagtggagatcgcaccactgcgctccagcctgggcaacagagcgagactccgtctcaaaaaaaagacaaaatacttgaaaagatattggctaggcgcgctggctcatgcctgtaatcccagcactttgggaggccaaggcgggtggatcacaaggtcaggagttcaagcagcctggccaagatggtgaaaccccgtctctactaaaaaaaaaaaaaaaaaaaaaaaaaaaattggccgggcacagtggctcatgcctgtaatcccagcactttgggaggctgaggcaggtggatcaggagtcaggagatcgagaccatcctggccaacatggtgaaaccccatctctatgaaaatacaaaaattagccagagatgatgccgggtgcctgtaatcccagctactcatgaggctgaggcagaagaatcacttgaaccagggagtcagaggttgcagtgagctgagatcgcaccactgcactccaccctgggcgacaaatcgagattccatctcaaaaaaagaaaaaaaaattaaaaggaatatttgcctcattatgttacaataactaatatggaaagcaatattgcaatgcctattagcacatgacattaggtgaattctcctttgtccccggacctgctgcctcctcctgcttgtcaggggacagatccagtacatctcccctcagcgctgggtggacctaacccttgctttcttggaggaaacccaggaatccagagacaaagtggaagggtactggcatgtggttgggcagggctgcctgaggtcggtgtcagccgaccgtggggcttggtcccaggaggctgcttactgggccctgctcctctggtttcccccaagtcgtgattctgaaatgaataaggacggtgcagaactggactacaaatgcaggagtgacttcctgggagggtggggcccctatctctcctagactctgtggtcagactctggccaacaccccctgtaaggccacaggagaggaacaggagtgatagcccccaaaccccagtcccaccaggccctgagggcccctttgtcactggatctgataagaaacaccacccctgcagccccctcccctcacctgaccaatggccacagcctggctgggcccagctccctgtatataaggggaccctgggggctgagcactaccaaggccagtcctgagcaggcccaactccagtgcagctgcccaccctgccgccatgtctctgaccaagactgagaggaccatcattgtgtccatgtgggccaagatctccacgcaggccgacaccatcggcaccgagactctggagaggtgagtgtcagacgggactgccagagggactgggtgggaggccaggtatgtgagtggggacagtggggagggggcggtggggaggggacagtggggaggggaccatggagaggagacagtggggagggcactgtggggagaggacagtgaggaggggaccttggggaggggacagtgaggagggaaccgtggagaggggacagtgaggaagggacagtgaggacagatagcgttccctctcagtgaggagagcagggtaaggagggaacgattaggagttgcacaaccatctgggctcgctgagacctgggcaggcacaggcccaggttctgacaagcagagggtgaaaggtttcgttctaggcctgaagggccttacagggcagccagggcactacagcctctaaagtcccagcatctgggatcagggcactgtcccagcttcaaattcccagcatctgatcccctgggaggggccagggagcttttccttccctggaacgctgctgggaggtcatgagcctgcagaaggggtggcgggcaacccagtctggggctgggagggaggtcctgtggccagaggagacggtggaggggctgggggcaccaggcgtgctggaggcggagggcgggagatttggggaccaggctgcacagaacccgtcggaagcagggcgatcagccgggagctgcagaggcctggggggcctctagcccagggcagcctgggaggggcagctgcctgggcacccgggccccgcgaggaggggctggggcctgctgcggggtcgcagatgtgtcccggtgctcggagagggccgcagggcgcgtgggccgtggcgggaggccgcgctgctgggagctcacggcccccgccccccgtcccaggctcttcctcagccacccgcagaccaagacctacttcccgcacttcgacctgcacccggggtccgcgcagttgcgcgcgcacggctccaaggtggtggccgccgtgggcgacgcggtgaagagcatcgacgacatcggcggcgccctgtccaagctgagcgagctgcacgcctacatcctgcgcgtggacccggtcaacttcaaggtgcgcggggcgcggtgcgggcggggcgggacggggcggggcgcggtgcgggcggggcggggcggggcggggcggggaggggcggggaggggcggggtcgcggggcggatgcgggggtcgccgggcggggcccgggctaggccccgccccctcactgagccgcccccgcccccagctcctgtcccactgcctgctggtcaccctggccgcgcgcttccccgccgacttcacggccgaggcccacgccgcctgggacaagttcctatcggtcgtatcctctgtcctgaccgagaagtaccgctgagcgccgcctccgggacccccaggacaggctgcggcccctcccccgtcctggaggttccccagccccacttaccgcgtaatgcgccaataaaccaatgaacgaagcagcgtccacctggtctctgttgtccgtgggcggcgggcgcttggggaggcggagcgggaggagggcgccccggctgtctcggggccactgctgggccgcagggatccttgcaccgaccccagggtctctaagaggcagagggatgtgcagctcccggggcgggagcgggggtcactcgggacccaggcgtggtggagaaggggtgcagttaggcctttgcggaggggggagcagtgctggcgcccacccgccgcggctctccctgggacctccgtggtcttccttctttatttctcccgaatgtgtactatttcctgatttcagaacgatcaggacgaagaggggagggatgggcgtctgcgctcactcattccttcttccattcctcaatgaaacatttactgggcataagacagcctaggcatgtttctaggctatggataccgcagctgaaataaagaaagccctctgccccgtggggctgacaatctagtgggggatacagacgtgatgaagacagtcagatcacagttcacagaaatgagacaggaaaagaggctgagcctcactcataagagaaacgcaagttaaactacacaaaaataaaaaacctcactgagatccatgtctcacctccctgataggcaaaaatccaagagtttgatcagactgcaggcgcccctcctccactgggcacccctcatccagggcagagggaaccagcccggggcgcaagtccaccggggcatctcatttgctaaagacctgaaaacccaggtgtccatcatcaggactaactggaaaaaccaagggtatccgcaccatggagagctcgactgaaaaaaaaaaatgaggataattggataatttctttttttttttttttttttttcagacggagtctcgctctgtcgcccaggctggagtgcagtggtgcgatcccggctcactgcaagctccgcctcctggtttcaagcgattctcctgcctcagcctcccgagtagctgggtctacaggcgcccgccaccacggctggctaattttttgtatttttagtagagacggggtttcaccgtgttagccaggatggtctcgatctcctgacctcgtgatccacccgcctcggcctcccaaagtgctgggattacaggtgtgagccaccgcgcccgacctaaaatgaggataatttctaataatgaaaataaagaggttagaatggtgtgtatacaatggtggaacagaggagaaacacgaatatgtgtgtgcacatatatgtgagcttatgcataactatgtatgaggctgcgtgtggacatgtgtgtttgtgcacaaccatgtatgtgcccgcatgtgcttatttctgcaaaaataaaccatggcaggacaaaccggaaatgaatacaaataataaggtgggtggggatggaggggaaggtggaaggaagctcctgcaagtctgactctctacatagttttgacctttgatttgtgtaaatattttacattatcaaaaataaattcaggctgggcatggtggctcatacctgtagtcctagcactttgggagtccaaggggagaggattgcttgaggccaggagttgaaggccaccctggccaacatagagagaccctgtctttaaaaaaaattacaaaattaaggccgggcgcggtggctcacgcctgtaatcccagcactgtgggaggccgaggtgggcggatcacgaggtcaggagattgagaccgtcctggctaacacggtgaaaccccgtctctactaaaaagtagaagaaattagccgggtgtggtggcgggtgcctgtagtcccagctacttgggaggctgaggcaggagaatggtgtgaacccgggaggcggagcttgcagtgagccaggttcaagccactgcccttcagcctaggtgatagagtgagactccttctcaaaaaaaaaaaaaaaattacaaaattaataagattaaaataaaaagaggggccttgccagtggctcaagcctctaatcctaccacttgggaggccaaggctggaggatcccttgatgccaagagtcggaggccagcctaggtaacacagcaggacctcgtctcaaaaagattaaaaaattaactgggcatggtagcctccaaattgggggttagcctgggaggtttgcccaggaaggaattcaagggcaagctggtggtgttacacagcaactctgattgatatcgaagccacagcagacagcaggagcagaacactgctccttacagagcaggggtaccccataggctgtgtgcacaggagagcaactcagaggcactgctgcactcatctttatacccacttttcattatatgcaaattaagggaaagttatgcacaaatttctaggatgagtgtggtaacttctgggtggtccagtcactgccatggaaagggatggtaaactcccatggcacactggtgggtgtgtcttatggaaagctgcttctgccctacttgttttagctggtcctcagtttggtccggtgtccgagcccaacatccggagtacatgcagagtcccacctcctacgtcacacctgcagttccagctactcaggaggctgaggctggaggattgctggagcccagatgttgaaggctacagtgagctatgattgtgccaccgcacttcagcctgagcaacacagcaatactctctctctaaaaaagcaaagcacacaaacaaaaagagtgactgggtgcagtggctcacacttggaatcttagcactttgggaggccaaggtgggatggtcacttgagcctgggagttcaagaccagcctaggcaacatagcaagactttatctctactaaaatatatatatattttttaattagctggacatggtggtgcacctgcagtcccagctacttgggaggctgagttgggggtggaggggagtatcacttgagcccagaagttccaggctgtagtaagctatgattgcaccactgcactccagcctgggcaacagagagagaccttatctatatttaaaaaaaaaaaaaaaaagagagagaaaattgaaaactcctaattgaaaacccccaaattgaaaactaacttaaataaatgagccaatgtaagaatgtggtgatataataatcagaaaaaaggattgttccaggtgacctctgaacacagaacctcggctatgaccgaaagaactccaaagacactctaacactccgtggtttattgttcctcataacatatataaaataatttcataagcttttattttgaaacatattcagattatgaagaaataaaaacaccctgcaagaataagacaaagatggagaaggaaggatgactgctggtgggtttggggcttttggagggtgatggaaaccttctaaaattgattatggtgatggtcgcacaattatgtgaacacattaaaaattattgaaatgggccgggggtggtggctcacccctgtaatcccagcactttgggaggccaacgcgggcagattacctgagctcaggagttccagactaacctggccaacatggtgaaacccccgtccctactaaaaatgcaaaaattagccacgcatggtggcacatgcctgtaatcccagctactggggaggctgaggcaggagaattgcttgaacccaggagacagaggttgcagtgagccgagattgtgccactgaactccagcttggccgacagagtgagactctgtctcaaaaaaaaaaaaaattattgaaatgtacacattaagtgggtgaattttatctcaataaaactgttaaataaaataacaagaatatgaaaaactcttgaatactactcatccagactctccagctgttaacattctaccacatcggcttgctctctcttgcccccacttgctctttctctcggagcccttggagaggggtatgcaaatatccgtactctaaatatcctccatatactgtgtatttcctaaaatcaacaaggacattaggctgcacagccagagaacaaccatcaaaatcaggttaatattgatccaaatccatctatcaacagaagcaacatcaagttcaagacccttttgaaagcaatgataccagccatttactccatccctaaaggactgagggtgctgcgaatttaaccgtatcaatgcagtctttttgatgttatttactgaaggaaatggatgttctttaaaatatgtatttatttatttttcttttttgagacggaatcttgttctgtcgcccaggctggagggcagtgggacaatcttggttcactgcaacctctgcctcctgggttcaagaggttctcctgcctcagcctcccgagtagctgggattacaggcgcgaaccaccacgcccggttaattttggtatttttagtagaggcggggttttaccatgttggccaggctggtctcaaactcctgacatggtagcctgtaatcccagctactcgggaggctgaggcaggagaatcgcttgaacccaggaggtggggttgcagtgagccaagatcgtgccattgcactccagcctgggagacagagcgagactccatcaaaaaaaaaaaaaaaaaaaattcctgaagctcctcttgagcttacattctagtggactgtaaacagaaacatttttttttcctgtggataaagaaaagcagggcaagtaggggcttagacagaggaggggaggattcagattttaaatgggttggccactgtaggtctattaacgtggtgacatttgagggagtggcaatactagggaaggggcttcaggggagtggccaggagctagggatagagggagggaggacaggaggccttgtctgtcttttcctccatatgtaagtttcaggagtgagtggggggtgtcgagggtgctgtgctctccggcctgagcctcaggaaggaagggcagtagtcagggatgccagggaaggacagtggagtaggctttgtggggaacttcacggttccattgttgagatgatttgctggagacacacagatgaggacatcaaatacatccctggatcaggccctggggcctgagtccggaagagaggtctgtatggacacacccatcaatgggagcaccaggacacagatggaggctaatgtcatgttgtagacaggatgggtgctgagctgccacacccacattattagaaaataacagcacaggcttggggtggaggcgggacacaagactagccagaaggagaaagaaaggtgaaaagctgttggtgcaaggaagctcttggtatttccaatggcttgggcacaggctgtgagggtgcctgggacggcttgtggggcacaggctgcaagaggtgcccaggacggcttgtggggcacaggttgtgagaggtgccctggacggcttgtggggcacaggctgtgagaggtgcccaggacggcttgtggggcacaggctgtgagggtgcccgggacggcttgtggggcacaggttgtgagaggtgcccgggacggcttgtggggcacaggtttcagaggtgcccgggacggcttgtggggcacaggttgtgagaggtgcccgggacggcttgtgggacacaggttgtgagaggtgcctgggacggcttgtggggcacaggctgtgagggtgcctgggacggcttgtggggcacaggttgtgagaggtgcccgggtcggcttgtggggcacaggttgtgagaggtgcccgggacggcttgtggggcacaggttgtgagacgtgcccgggacggcttgtggggcacaggctgtgagggtgcccgggtcggcttgtggggcacaggctgcaagaggtgcccgggacggcttgtggggcacaggctgtgagggtgcccgggacggcttgtggggcacaggctgtgagggtgcccgggacagctcgtggggcacaggttgtgagaggtgcccgggacggcttgtggggcacaggctgtgagggtgcctgggacggcttgtggggcacaggttgtgagaggtgcccgggacggcttgtggggcacaggttgtgaggatgcccgggatggcttgtggggcacaggttgtgagaggtgcctgggacggcttgtggggcacaggctgtgagggtgcccgggacggcttgtggggcacaggctgtgagaggtgcctgggacggcttgtggggcacaggctgtgaggatgcccgggacggcttgtggggcacaggttgtgaggggtgcccaggacggcttgtggggcacaggctgcaagaggtgcccaggacggcttgtggggcacaggttgtgagaggtgcccgggacggcttgtggggcacaggctgtgagggagcccggcacggcttgcagctacagggagaaaagacttggtgctgtgggcctgccttggggctggtggtacagcccttatctgctgccctcaggatctcccggcccctctcgtccaggcccctgcaaccccatgccccagcctctgaggaccaaaggcgcccctgcttgggaagagggggctcaggggagtcgcctgacccggttccaagccaggctgatttaccgttgctaacatcctatcgcacgcatccctctgcctcatgcacccaaccccaaggcctggtacactgcaggccccaaggtcctgtgcgtcctttcaataccctcctcacctgcctcacctgccccccctaccctgactctggctggagaccccctccagggagttttcaaaacaaagggtgtcagtctcctgtgggattccctcacctctgcagcctgcggtctgaaagctgccccatggtgtgtagtgctaaacttccaacttactccaggccagcggtgacagcccgagggcaggaagggcacccacactgagcctcaaacagctaattttgcaactgtaagtccatataattgtcttgaaaagtaatttgtttcaaaaagctaaaaaacgaatactcttgagtctccttctagtaattccccttctagaggtctatcaccaggaaaagatccaaagcactgatattcttcatggagttgtttataatagaaaaaaactagagcttgttcacaaaggggagctctgcaggctgaagatgttgcacctgtcagcggggatgggggcacgcttgctgacgcagcaacggaaaagcatcagtgtgtgaagatgcattttctctctttctattattattatttttatttttattttttctgaggcagaacctcgctctgtcacccaggctggagtgcagtgatgcgacctcatcacaaccacgagccaccatgtgcggccccatgagcaagccaccacgcccagcctttttttcccttgttttaaaaaatcctctatttaaaaaagatgtgcatgggccgggcacggtggttcacgctcataatcccagctctttcagaggccgaggcaggcagatcacctgaggtcaagagttcgacaccagcctggccaacatggtgaaattccatctgtactaaaaatacaaaaattagccaggccgtggtggtgtgtgcctgtaatcccagctactcaggagactgaagcaggagaatcacttgaacccaggaggcagaggttgcagtgggtcaaaatcatgccaccacactccagtctgggagacagagcaagactccatctcagaaacaaactaacaaacaaaatttttatatctacctataattcgtataaatttaaaatacatgcataaaatcataccctttgcaagcacacgtactaactaaaaggaatatattcagcacatagaaatggttgtctaacggaggaggggggagttaataaacagagaggataaaaagaaataaatcagtagagctggaggagggtctcctccaggctgcgatgagaacatagtgagcagaattgcaggcctgcatgacctcaccttctgtgaggagtccggcctcccaagacgctttcctgcctaggtgcccggctcagagtgtcccctacaaggctactggaggagaaccccagaccgagcctcattcaggtgagggggctgcacaccggaggtgggagaggtctgtcccttcccaccctgtgacactgggtcccactttctctctagggggtctcggtttcctcatttgcaaactggagctcataaggtgggccagagaagtttcagtgaagtgaggaatggatcgtccctctgccagggcccatgtgctctaggtcaccctgtcatcacagggacagggaggtcaaggacagtcactcctgaggccagtccgggctgggctgaccacgtggactctcatgcccagattggggccccaatctccctgaagctggggctccagctgtgactcaggggtgggcagaaggggagacagaagcgataggttcctcagcccccagtcccacctgagggcccctttgtcactggatctgataagaaacaccacccctgcagccccctcccctcacctgaccaatggccacagcctggctgggcccagctccctgtatataaggggaccctgggggctgagcactaccaaggccagtcctgagcaggcccaactccagtgcagccgcccaccctgccgccatgtctctgaccaagacttaggggaccatcattgtgtccatgtgggccaagatctccacgcaggccgacaccatcggcaccgagactctggagaggtgagtgtcagatgggactgccagagggactgggtgggaggccaggtatgtgagtggggacagtggggagcgggcagtggggaggggaccgtggggaggggacagtgagtaggagacagtggggagaggacagtggagaggggacagtgaggaggggaccatgggaaggggaccgtggagtggggacagtgaggaggggaccatagggaggggacagtggggaggggacagtgaggaggggaccgtggggaggggacagtgaggaggggaccgtggggaggagacagtgaggaggggaccgtagggaggggacagtgaggaggggaccgtggggaggggacagtgaggaggggaccgtggggaggggacagtgaggaggggaccgtgggaaggagacagtgaggaggggaccttggggaggggacagtgaggaggggaccatggggaggggacagtgaggaggggacaatggagaggggacagtgaggaggggactgtggggagaggacagtgaggaggggaccatggggagggcacagtggggaggggagagtgaggaagggacagtgaggaggggactgtggggaggggacagtggagacagatagccttccctctcagtgaggagggcagggtaaggagggaacgattaggagttgcacaaccatctgggctcgctgagacctgggcaggcacaggcccaggttctgacaagcagagggtgaaaggtttcgttctaggcctgaagggccttacagggcagccagggcactacagcctctaaagtcccagcatctgggatcagggcactgtcccagcttcaaattcccagcatctgatcccctgggaggggccagggagcttttccttccctggaacgctgctgggaggtcatgagcctgcagaaggggtggcgggcaacccagtctggggctgggagggaggtcctgtggccagaggagacggtggaggggctgggggcaccaggcgtgctggaggcggagggcgggagatttggggaccaggctgcacagaacccgtcggaagcagggcgatcagccgggagctgcagaggcctggggggcctctagcccagggcagcctgggaggggcagctgcctgggcacccgggccccgcgaggaggggctggggcctgctgcggggtcgcagatgtgtcccggtgctcggagagggccgcagggcgcgtgggccgtggcgggaggccgcgctgctgggagctcacggcccccgccccccgtcccaggctcttcctcagccacccgcagaccaagacctacttcccgcacttcgacctgcacccggggtccgcgcagttgcgcgcgcacggctccaaggtggtggccgccgtgggcgacgcggtgaagagcatcgacgacatcggcggcgccctgtccaagctgagcgagctgcacgcctacatcctgcgcgtggacccggtcaacttcaaggtgcgcggggcgcggtgcgggcggggcggggcggggccgcggggcgggcggggccgcggggcggggtcgcggggcggggcggggtggggtcgcggggcggggcggggtcgcggggcggggcggggcggggcggggcgggcggggcggccggggcccggcggggcggggcggggcggggaggggctgggcggggcggggcgcggggcggggcgggccgggccggggcggggtcgcggggcggggtcgcggggcggggcgcggggcggggcggggcggggtggggtcgcggggcggggcccgggctaggccccgcccccgcactgagccgcccccgcccccagctcctgtcccactgcctgctggtcaccctggccgcgcgcttccccgccgacttcacggccgaggcccacgccgcctgggccaagttcctatcggtcgtatcctctgtcctgaccgagaagtaccgctgagcgccgcctccgggacccccaggacaggctgcggcccctcccctgcccttcaccctcccacagttcctgccctgactccaataaatggatgaggacggagcgatctgggctctgtgttctcagtattggagggaaggaggggagaagctgagtgatgggtccgggggcttcgcaggaactcggtcgtccccactgtcgtcgcggcctggggttcacttggggggcgccttggggaggttctagcccctgagcaccggagctgcggcccgggtggagcggagcagtcccgggccggcccgcggcgtctcctggggtccttgagtcggacgggcgtttgtgcgtctcccggcttcccatatcgcacaaagattgtcacttcactaagcgtattggaagcgtgtcggggctcagggaacttttccacaaagcctgacgtccgaatcccgggactctggcagctacgggggtccctgaggccggtccctccccgactcctaagagagtagggggtttcctgcccggtgttctctctccggttcctcccatgtgctccctcctggcagagcagtaactttacccgaggggagtaaacagatgcccctaaagtctgcagtaaaggtgcccacgcgcaacggcgtgggtcaatgccagaaaccctgggatcccggaggtcgaggcctccacacagacgggaacccgggctggttacgttccccggcgcaggccgagggtccccgcgttcccgccgcgctcgggccgataaggacgggcggggtgcccggaggctctataaggaggccagggcggcgggcgcggcccccagagcacgtcaggcggcgccatgctcagcgcccaggagcgcgcccaaatcgcgcaggtctgggacctgattgcgggccacgaggcgcaattcggggcggagctgctgctcaggtcggtagaggcggggtctccgggagctcagggaggtggagatgagggttttgggcgcgtgggccgccaacgccatccaaggtccttcgggtgcggatccccgggctctgggcggtgtgggcgctagtgaagccccacgcagccgccctcctccccggtcactgacctggtcctgcaggctcttcacggtgtaccccagcaccaaggtctacttcccgcacctgagcgcctgccaggacgcgacgcagctgctgagccacgggcagcgcatgctggcggctgtgggcgcggcggtgcagcacgtggacaacctgcgcgccgcgctgagcccgctggcggacctgcacgcgctcgtgctgcgcgtggacccagccaactttccggtgaggcctttccggccggggcaatggtgcagcgcgcagccggggtgggggggctctgggggtccctagcggggcagaccccgtctcaccggccccttctcctgcagctgctaatccagtgtttccacgtcgtgctggcctcccacctgcaggacgagttcaccgtgcaaatgcaagcggcgtgggacaagttcctgactggtgtggccgtggtgctgaccgaaaaataccgctgagccctgtgctgcgcaggccttggtctgtgcctgtcaataaacagaggcccgaaccatctgcccctgcctgtgtggtctttggggagctagcaaagcgaggtcactattgttggccagtgaagctcagggacctaaaaggagcctcctagaactctcaaatgcgccccacccccggaggtttgtcctcccatggcgaggagtgcgatggggcagagggagcactgtgatgtggcgggggtagggagggtggccttcgacttcaacccttgaatcgggcttccaaccatactgttcgcaaagcacttccccattcacgcatttattcattcattctccctccatccccacttcctgctgggacctgtagatgctaatcctggccctttttgcagagagatgcagaaactgaggtcccagagccaaatgtgcaacctaattcgttggcccagagcagagggctccgcagacctgttcctttccccttccttcccccatggacacttcctcagtggcaaacctgcgctagcctggttagccctccctgtgaccctgcagccctggggatgaggtcgggaggaagtcctcagtggccacaatttggcagacagagcaggtttagtcttccagcctgctcaatgacaagctgtgcgaccctgggcgtgtcccagagctctcaggcctttacctatcgaatagaaaaacaacgtccaactcacgagatttttgaaataatttttgaaatcataacacagggtgggtgcctgcagggtcgttgccaccccacccctccacccagccccagctgccgtgtctcaatctctgcaggtgcccaggccaaggcactcccttccccaggttccctcttctccctccccaggactgggaagggaatcttagggctccaccccaggcttttcagacaaagaataggggctgaggaaagagtgggaccttggaggtctccaaaccctgaatagggttggctctgggttggccatcctgggtctgtgtggggagcactggaccaggcctggcacccaggtctgacctggcagtcagcaacgaggtctgaagagagctgctggaagtggagccctgactgtgagtcggccaaactccccccagcagtcagtgccagtgacctgttgccctgcactgcctgggaccccagcccggtagtttggagaacttggccccacgttatctacatcccccaactgtttttttgtttttgggggttttttttttttttgctttgtttttgtttttgagataggcccttgctctgacaccccggctggagtgcagtggcacagttttggctcactgcagcctcaacctcctgggttcaagcgattctcctgcctctgtctcccgtgtagctgggattacaggcatgggccgccattcctggctaatttttgtatttttaatagagacacagtttcaccatgttgatcaggctggtctcaaactcctgacctcaagtgatctgccctcctcggtctcccaaagtgctgggatgacaggcgtgagccaccacacccagcccccgcaactgtttacatggataattaacagctttttgtcccaggcagagtttggtgtgaaagcagcttatgtttcactttggaaaaactgtgctcttctccccatccaggaagctgcctgggtctgggccatatgtggataccttatgggtataagctgctcaggaccctgtgtggaagctcaggacaatgccagcgggaaggctaccatgtggagagctggtctctgtttgggcaggactaagagacgcagggcagccttgggcaacctgtctactctcactcactcctcctcccctttcctgtgccaggcacctcctggcaacttgccagccaatgaccctgcatcccaggcataagagctcctactctcccccacctttcacttttgagcttacacagactcagaaataagctgccgtggtgctgtctcctgaggacaaggctaacaccaaggcggtctgggagaaagttggcaaccacactgctggctatgccacggaggccctggagaggcaagaaccctcctctccctgctcacaccttgggtccaacgcccactccagggctccactggccacccctaactattcttaccctggacccagcccccagcccctcactctttgcttccccctgaagcatgttcctgaccttcctctcacttggccctgagttatggctcagcccagatcaagaaacaatgcaagtaggtggccgacacgctgaccaatgccgtggtccacttagatgacatgcccaatgatgtgtctgagctgaggaagctgcatgtccacgagctgtgggtggacccaggcaacatcagggagagctttgggctgggaggaatctagggtgtgggggcagctggccttcctcataggacagaccctcccacgcgttcagggaggtggagcacaggtggcagtagtatctgcatcccctgactctctctccacagttcctgggtaaatgcctgctggtgacctaggcctgccacacccttcccagtttacccatgtggtgcctccatggacaaattatttgcttttgtgagtgctgtgttgacctaaaaacaccattaagctagagcattggtggtcatgccccctgcctgctgggcctcccaccaggccctcctcccctccctgccccagcacttcctgatctttgaatgaagtccgagtaggcagcagcctgtgtgtgcctgggttctctctgtcccggaatgtgccaacagtggaggtgtttacctgtctcagaccaaggacctctctgcagctgcatggggctggggagggagaactgcagggagtatgggaggggaagctgaggtgggcctgctcaagagaaggtgctgaaccatcccctgtcctgagaggtgccaggcctgcaggcagtggctcagaagctggggaggagagaggcatccagggttctactcagggagtcccagcatcgccaccctcctttgaaatctccctggttgaacccagttaacatacgctctccatcaaaacaaaacgaaacaaaacaaactagcaaaataggctgtccccaatgcaagtgcaggtgccagaacatttctctcattctcaccccttcctgccagagggtaggtggctggagtgagggtgctggccctactcacacttcctgtgtcatggtgaccctctgagagcagcccagtcagtggggaaggaggaaggggctgggatgctcacagccggcagcccacacctggggagactcttcagcagagcaccttgcggccttactcctgcacgtctcctgcagtttgtaaggtgcattcagaactcactgtgtgcccagccctgagctcccagctaattgccccacccagggcctctgggacctcctggtgcttctgcttcctgtgctgccagcaacttctggaaacgtccctgtccccggtgctgaagtcctggaatccatgctgggaagttgcacagcccatctggctctcagccagcctaggaacacgagcagcacttccagcccagcccctgccccacagcaagcctccccctccacactcacagtactgaattgagctttgggtagggtggagaggaccctgtcaccgcttttcttctggacatggacctctctgaattgttggggagttccctccccctctccaccacccactcttcctgtgcctcacagcccagagcattgttatttcaacagaaacactttaaaaaataaactaaaatccgacaggcacggtggctcacacctgtaatcccagtactttgggaggctgaggcgagaggatcacctgaggtcgggagtttgagaccagcctgaccaatatggagaaaccccagttatactaaaaatacaaaattagctgggtgtggtggcgcatgcctgtaatcctagctactaggaaggctgaggcaggagaatcgcttgaacccgggaggtggaggttgaggtgagctgagatcacgccattgcactccagcctgggcaacaagagcaaaactccgtctcaaaaaataaataaataaataaataaataaactaaaatctatccatgctttcacacacacacacacacacacacacacacacccttttttgtgttacttaaagtaggagagtgtctctctttcctgtctcctcacacccacccccagaagagaccaaaatgaagggtttggaactcagcccatgggccccatcccatgctgagggaacacagctacatctacaactactgccacaggctctctttttggacaaaaataccatcatactgtagatacctgtgtacaacttcctattctcagtgaagtgtctcccctgcatccctttcagccagttcattcagctctgcgccattccacagtctcactgattattactatgtttccatcatgatccccccaaaaaatcatgactttatttttttatttttattattattatttttttttttttttttgtgacggagtctcgctctgtcacccaggctggagtgcagtggcacaatctcggctcactgcaagctccacctcgcaggttcacgccattctcctccctcagcctcccgagtagctgagtagctgggactacaggcgccccccactacgcctggctaattttttctatttttaatagagacagagtttcactgcattagcgaggatggtctcgatctcctgacctcgcatctgcccgcctcagcctcccaatgtgctgggattacaggcgtgagccaccgcgcccggccttatgtatttatttttttgagacagagtctcgctgtgtcgtcaggctagagtgctgtggcacgatctcggctcactgcaacctccaactccctggttcaaaggattctccagcctccacctcccgagtagctgggattacaggcgtgcaccaccacacccagctaatttttgtatttttagtagagacggggtttctccatgttggtcagcctggtctcgaactcccgacctcagctgatccacccgccttggcctcccaaagtgctgggattacaggcgtgagccaccgagcctggccaaaccatcacttttcatgagcagggatgcacccactggcactcctgcacctcccaccctccccctcgccaagtccaccccttccttcctcaccccacatcccctcacctacattctgcaaccacaggggccttctctcccctgtcctttccctacccagagccaagtttgtttatctgtttacaaccagtatttacctagcaagtcttccatcagatagcatttggagagctgggggtgtcacagtgaaccacgacctctaggccagtgggagagtcagtcacacaaactgtgagtccatgacttggggcttagccagcacccaccaccccacgcgccaccccacaaccccgggtagaggagtctgaatctggagccgcccccagcccagccccgtgctttttgcgtcctggtgtttgttccttcccggtgcctgtcactcaagcacactagtgactatcgccagagggaaagggagctgcaggaagcgaggctggagagcaggaggggctctgcgcagaaattcttttgagttcctatgggccagggcgtccgggtgcgcgcattcctctccgccccaggattgggcgaagccctccggctcgcactcgctcgcccgtgtgttccccgatcccgctggagtcgatgcgcgtccagcgcgtgccaggccggggcgggggtgcgggctgactttctccctcgctagggacgctccggcgcccgaaaggaaagggtggcgctgcgctccggggtgcacgagccgacagcgcccgaccccaacgggccggccccgccagcgccgctaccgccctgcccccgggcgagcgggatgggcgggagtggagtggcgggtggagggtggagacgtcctggcccccgccccgcgtgcacccccaggggaggccgagcccgccgcccggccccgcgcaggccccgcccgggactcccctgcggtccaggccgcgccccgggctccgcgccagccaatgagcgccgcccggccgggcgtgcccccgcgccccaagcataaaccctggcgcgctcgcgggccggcactcttctggtccccacagactcagagagaacccaccatggtgctgtctcctgccgacaagaccaacgtcaaggccgcctggggtaaggtcggcgcgcacgctggcgagtatggtgcggaggccctggagaggtgaggctccctcccctgctccgacccgggctcctcgcccgcccggacccacaggccaccctcaaccgtcctggccccggacccaaaccccacccctcactctgcttctccccgcaggatgttcctgtccttccccaccaccaagacctacttcccgcacttcgacctgagccacggctctgcccaggttaagggccacggcaagaaggtggccgacgcgctgaccaacgccgtggcgcacgtggacgacatgcccaacgcgctgtccgccctgagcgacctgcacgcgcacaagcttcgggtggacccggtcaacttcaaggtgagcggcgggccgggagcgatctgggtcgaggggcgagatggcgccttcctctcagggcagaggatcacgcgggttgcgggaggtgtagcgcaggcggcggctgcgggcctgggccgcactgaccctcttctctgcacagctcctaagccactgcctgctggtgaccctggccgcccacctccccgccgagttcacccctgcggtgcacgcctccctggacaagttcctggcttctgtgagcaccgtgctgacctccaaataccgttaagctggagcctcggtagccgttcctcctgcccgctgggcctcccaacgggccctcctcccctccttgcaccggcccttcctggtctttgaataaagtctgagtgggcagcagcctgtgtgtgcctgggttctctctatcccggaatgtgccaacaatggaggtgtttacctgtctcagaccaaggacctctctgcagctgcatggggctggggagggagaactgcagggagtatgggaggggaagctgaggtgggcctgctcaagagaaggtgctgaaccatcccctgtcctgagaggtgccaggcctgcaggcagtggctcagaagctggggaggagagaggcatccagggttctactcagggagtcccagcatcgccaccctcctttgaaatctccctggttgaacccagttaacatacgctctccatcaaaacaaaacgaaacaaaacaaactagcaaaataggctgtccccagtgcaagtgcaggtgccagaacatttctctcattcccaccccttcctgccagagggtaggtggctggagtgagggtgctggccctactcacacttcctgtgtcacggtgaccctctgagagcagcccagtcagtggggaaggaggaaggggctgggatgctcacagccggcagcccacacctggggagactcttcagcagagcaccttgcggccttactcctgcacgtctcctgcagtttgtaaggtgcattcagaactcactgtgtgcccagccctgagctcccagctaattgccccacccagggcctctgggacctcctggtcttctgcttcctgtgctgccagcaacttctggaaacgtccctgtccccggtgctgaagtcctggaatccatgctgggaagttgcacagcccatctggctctcagccagcctaggaacatgagcagcacttccaacccagtccctgccccacagcaagcctccccctccacactcacagtactggattgagctttggggagggtggagaggaccctgtcactgctttccttctggacatggacctctctgaattgttggggagttccctcccctctccaccacccgctcttcctgcgcctcacagcccagagcattgttatttcagcagaaacactttaaaaaataaactaaaatccgacaggcacggtggctcacgcctgtaatcccagcactttgggaggccgaggtgggaggatcacctgaggtcgggagtttgagaccaccctgatcaacatgtagaaaccccatctatactaaaaatacaaaatcagccgggcatggtggcccatgcctgtaaacccacctactccggaggctgaggcaggagaatcattttaaccaaggaggcagaggttgcagtgagctaagatcacaccattgcactccagcctggaaaacaacagcgaaactccgcctcaaaaaaaaaaaagcccccacatcttatcttttttttttccttcaggctgtgggcagagtcagaagagggtggcagacagggaggggaaatgagaagatccaacgggggaagcattgctaagctggtcggagctacttccttctctgcccaaggcagcttaccctggcttgctcctggacacccagggcagggcctgagtaagggcctggggagacagggcagggagcaggctgaagggtgctgacctgatgcactcctcaaagcaagatcttctgccagacccccaggaaatgacttatcagtgatttctcaggctgttttctcctcagtaccatccccccaaaaaacatcacttttcatgcacagggatgcacccactggcactcctgcacctcccacccttccccagaagtccaccccttccttcctcaccctgcaggagctggccagcctcatcaccccaacatctccccacctccattctccaaccacagggcccttgtctcctctgtcctttcccctccccgagccaagcctcctccctcctccacctcctccacctaatacatatccttaagtctcacctcctccaggaagccctcagactaaccctggtcaccttgaatgcctcgtccacacctccagacttcctcagggcctgtgatgaggtctgcacctctgtgtgtacttgtgtgatggttagaggactgcctacctcccagaggaggttgaatgctccagccggttccagctattgctttgtttacctgtttaaccagtatttacctagcaagtcttccatcagatagcatttggagagctgggggtgtcacagtgaaccacgacctctaggccagtgggagagtcagtcacacaaactgtgagtccatgacttggggcttagccagcacccaccaccccacgcgccaccccacaaccccgggtagaggagtctgaatctggagccgcccccagcccagccccgtgctttttgcgtcctggtgtttattccttcccggtgcctgtcactcaagcacactagtgactatcgccagagggaaagggagctgcaggaagcgaggctggagagcaggaggggctctgcgcagaaattcttttgagttcctatgggccagggcgtccgggtgcgcgcattcctctccgccccaggattgggcgaagcctcccggctcgcactcgctcgcccgtgtgttccccgatcccgctggagtcgatgcgcgtccagcgcgtgccaggccggggcgggggtgcgggctgactttctccctcgctagggacgctccggcgcccgaaaggaaagggtggcgctgcgctccggggtgcacgagccgacagcgcccgaccccaacgggccggccccgccagcgccgctaccgccctgcccccgggcgagcgggatgggcgggagtggagtggcgggtggagggtggagacgtcctggcccccgccccgcgtgcacccccaggggaggccgagcccgccgcccggccccgcgcaggccccgcccgggactcccctgcggtccaggccgcgccccgggctccgcgccagccaatgagcgccgcccggccgggcgtgcccccgcgccccaagcataaaccctggcgcgctcgcggcccggcactcttctggtccccacagactcagagagaacccaccatggtgctgtctcctgccgacaagaccaacgtcaaggccgcctggggtaaggtcggcgcgcacgctggcgagtatggtgcggaggccctggagaggtgaggctccctcccctgctccgacccgggctcctcgcccgcccggacccacaggccaccctcaaccgtcctggccccggacccaaaccccacccctcactctgcttctccccgcaggatgttcctgtccttccccaccaccaagacctacttcccgcacttcgacctgagccacggctctgcccaggttaagggccacggcaagaaggtggccgacgcgctgaccaacgccgtggcgcacgtggacgacatgcccaacgcgctgtccgccctgagcgacctgcacgcgcacaagcttcgggtggacccggtcaacttcaaggtgagcggcgggccgggagcgatctgggtcgaggggcgagatggcgccttcctcgcagggcagaggatcacgcgggttgcgggaggtgtagcgcaggcggcggctgcgggcctgggccctcggccccactgaccctcttctctgcacagctcctaagccactgcctgctggtgaccctggccgcccacctccccgccgagttcacccctgcggtgcacgcctccctggacaagttcctggcttctgtgagcaccgtgctgacctccaaataccgttaagctggagcctcggtggccatgcttcttgccccttgggcctccccccagcccctcctccccttcctgcacccgtacccccgtggtctttgaataaagtctgagtgggcggcagcctgtgtgtgcctgagttttttccctcagcaaacgtgccaggcatgggcgtggacagcagctgggacacacatggctagaacctctctgcagctggatagggtaggaaaaggcaggggcgggaggaggggatggaggagggaaagtggagccaccgcgaagtccagctggaaaaacgctggaccctagagtgctttgaggatgcatttgctctttcccgagttttattcccagacttttcagattcaatgcaggtttgctgaaataatgaatttatccatctttacgtttctgggcactcttgtgccaagaactggctggctttctgcctgggacgtcactggtttcccagaggtcctcccacatatgggtggtgggtaggtcagagaagtcccactccagcatggctgcattgatcccccatcgttcccactagtctccgtaaaacctcccagatacaggcacagtctagatgaaatcaggggtgcggggtgcaactgcaggccccaggcaattcaataggggctctactttcacccccaggtcaccccagaatgctcacacaccagacactgacgccctggggctgtcaagatcaggcgtttgtctctgggcccagctcagggcccagctcagcacccactcagctcccctgaggctggggagcctgtcccattgcgactggagaggagagcggggccacagaggcctggctagaaggtcccttctccctggtgtgtgttttctctctgctgagcaggcttgcagtgcctggggtatcagagggagggttcccggagctggtagccataaagccctggccctcaactgataggaatatcttttattccctgagcccatgaatcacccttggtaaacacctatggcaggccctctgcctgcgtttgtgatgtccttcccgcagcctgtgggtacagtatcaactgtcaggaagacggtgtcttcgttatttcatcaggaagaatggaggtctgacctaaaggtagaaatatgtcaaatgtacagcagagggctggttggagtgcagcgctttttacaattaattgatcagaaccagttataaatttatcatttccttctccactcctgctgcttcagttgactaagcctaagaaaaaattataaaaattggccgggcgcggtggctcacacctgtaattgcagcactttgccaggcttaggcaggtggatcacctgaagtcaggggttcgagaccagcctagccaacatagtgaaaccctgtctctactaaaaagacaaaaattgtccaggtgtgatgactcatgcctgtaaacctggcactttgggaggcggaggttgtagtgagtcaagatcgcgccatcgcactccagcttgggcaacaagagcgaaactctgtctcaaaaaaaaatttaatctaatttaatttaatttaaaaattagcacggtggttgggcacagtggctcacgcctgtaatcccagcactttgggaagccaaggtgggcagatcacaaggtcaggaattcgagaccagcctggccaatatggggaaaccccatctctactaaaaatacaaaaaattagccgggtgtggtggcgcacgcctgtaatcccagctactcgggaggttgaggtaggagaatcacttgaacccaggaggcagaggttgcagtgacccgagatcacaccattgcactctagcctgggcaacaagagcaaaactccatctcaaaaaaaattataaaaattatacatcagtagatgaatgggtaaacaaaatgtggtggtctatacacacaatggaatattatttggccacaaaaagaaatgaagcactgataggatgtagctgcaccctgaaaatatttgacaagtaaaagaagccggacaccaaaggtcacaaactgcatgaccccatctatatgcaatatccgctacagccaaatccatagggaccaaaagcggattagtggctgccggggccagagttactgttaatgagtaccgaggtggcgtttgggatgatgaaaaagttctgacctagatagtggtgatggctgcataacactaagtgttcttaatatcaccaaattttatacctgaaaaatggctacaatggtaatttatgtctattttatcaccttttttaaaacaaaaaagatataaggggtacagcagagtgagtgctgcatatgcatttactattattcttgggttacatcccaggtactcaataaatgttcactgccctgaagaaacacctgctacgagtcaggcacctcacagttgttatccgtttaattctcacaatctgagaagaaactgtcaccctcattttatataataaatgagaaaacagactcgggcaagtgtcacaatagaatcaagaggcagaataaactgacttccaatgccaaatccatgccgaaattcagtgctataataatgtacatggccgggcgcggtggttcacgcctgtaatcccagaactttgggaggctgaggcgggaggatcacctgaggtcgggagtttgagatcagcctaacacggtgaaaccctgtctctactaaaaatacaaaattggcatggtggcatgcacctgtgatcccagttactcgggaggctgaggcaggagaatcgtttgaacccgggaggcggaggttgcagtgagccggaatggcgccactgcactcaccgcacccggccaatttttgtgtttttagtagagactaaataccatatagtgaacacctaagacggggggccttggatccagggcgattcagagggccccggtcggagctgtcggagattgagcgcgcgcggtcccgggatctccgacgaggccctggacccccgggcggcgaagctgcggcgcggcgccccctggaggccgcgggacccctggccggtccgcgcaggcgcagcggggtcgcagggcgcggcgggttccagcgcggggatggcgctgtccgcggaggaccgggcgctggtgcgcgccctgtggaagaagctgggcagcaacgtcggcgtctacacgacagaggccctggaaaggtgcggcaggctgggcgcccccgcccccaggggccctccctccccaagccccccggacgcgcctcacccacgttcctctcgcaggaccttcctggctttccccgccacgaagacctacttctcccacctggacctgagccccggctcctcacaagtcagagcccacggccagaaggtggcggacgcgctgagcctcgccgtggagcgcctggacgacctaccccacgcgctgtccgcgctgagccacctgcacgcgtgccagctgcgagtggacccggccagcttccaggtgagcggctgccgtgctgggcccctgtccccgggagggccccggcggggtgggtgcggggggcgtgcggggcgggtgcaggcgagtgagccttgagcgctcgccgcagctcctgggccactgcctgctggtaaccctcgcccggcactaccccggagacttcagccccgcgctgcaggcgtcgctggacaagttcctgagccacgttatctcggcgctggtttccgagtaccgctgaactgtgggtgggtggccgcgggatccccaggcgaccttccccgtgtttgagtaaagcctctcccaggagcagccttcttgccgtgctctctcgaggtcaggacgcgagaggaaggcgccgcccctccccaaggaaaggcgagggcctggggcacacccccagtgcccagatccaggcgcgcctctttccacctccagcaggtttggggcctcggccatgggggcaccgaactgcgtgcagcctgaccctcccgaatggggtggtaggtgagggccgcgggacgccccgggcggcgggctgcgaggacggccgactctgcccatcccgagggcggctggcttcgccctccccactctgcgccgagcacgcggcccggacccaccgcgagaactccgcacctgcagcgtgaacgcacgcgggcggcgttaagggcccggggctgactcggagcaggttagggaacagcgccccctcccggcgcgagccggtacctgcgcagcacccagccgccgcggctgtggcctggaatcggggacctggggtgccggggggttgtggtgaaggaggtgggaccagccccagcacctagccacgtagctggcgaggtggaccaggaaccgacccagacccctgccgtcacccgacatcactacggagagtgaagcttttttatatttgtccacataaaaccaatcatggtcattgtagaacttccgaaaacaaggcttgctgcaccttcctgtgtatcccaggtccaggaatgggtgcagcacatccttcagctgccgcttgacacgcggcaaactgtgtcatgtgtaaacaagaacaggacatggctgtcatatccaagagcacatgtgtaacacagacatgccacacacacacacacacacacacggggtagaggcaggcctcatccacacccctaacatttgatgcgtagctgttccagtcttctaggcacatgtagagatgcttttcctcagaaatggtattctcaaggtgacactgaggaaaagtggacaggccgggcgcggtggctcacgcctgtaatcccagcactccgggaggccgaggcgggcggatc

SEQ ID NO: 91 - DNA, 576 bp, Homo sapiens
  misc_feature 1..576: note = Homo sapiens, NCBI Accession No. NM_000517
  source 1..576: mol_type = genomic DNA
actcttctggtccccacagactcagagagaacccaccatggtgctgtctcctgccgacaagaccaacgtcaaggccgcctggggtaaggtcggcgcgcacgctggcgagtatggtgcggaggccctggagaggatgttcctgtccttccccaccaccaagacctacttcccgcacttcgacctgagccacggctctgcccaggttaagggccacggcaagaaggtggccgacgcgctgaccaacgccgtggcgcacgtggacgacatgcccaacgcgctgtccgccctgagcgacctgcacgcgcacaagcttcgggtggacccggtcaacttcaagctcctaagccactgcctgctggtgaccctggccgcccacctccccgccgagttcacccctgcggtgcacgcctccctggacaagttcctggcttctgtgagcaccgtgctgacctccaaataccgttaagctggagcctcggtagccgttcctcctgcccgctgggcctcccaacgggccctcctcccctccttgcaccggcccttcctggtctttgaataaagtctgagtgggcagca

SEQ ID NO: 92 - DNA, 73326 bp, Homo sapiens
  misc_feature 1..73326: note = Homo sapiens, GenBank Accession No. J00179
  source 1..73326: mol_type = genomic DNA
gaattctaatctccctctcaaccctacagtcacccatttggtatattaaagatgtgttgtctactgtctagtatccctcaagtagtgtcaggaattagtcatttaaatagtctgcaagccaggagtggtggctcatgtctgtaattccagcactggagaggtagaagtgggaggactgcttgagctcaagagtttgatattatcctggacaacatagcaagacctcgtctctacttaaaaaaaaaaaaattagccaggcatgtgatgtacacctgtagtcccagctactcaggaggccgaaatgggaggatcccttgagctcaggaggtcaaggctgcagtgagacatgatcttgccactgcactccagcctggacagcagagtgaaaccttgcctcacgaaacagaatacaaaaacaaacaaacaaaaaactgctccgcaatgcgcttccttgatgctctaccacataggtctgggtactttgtacacattatctcattgctgttcgtaattgttagattaattttgtaatattgatattattcctagaaagctgaggcctcaagatgataacttttattttctggacttgtaatagctttctcttgtattcaccatgttgtaactttcttagagtagtaacaatataaagttattgtgagtttttgcaaacacagcaaacacaacgacccatatagacattgatgtgaaattgtctattgtcaatttatgggaaaacaagtatgtactttttctactaagccattgaaacaggaataacagaacaagattgaaagaatacattttccgaaattacttgagtattatacaaagacaagcacgtggacctgggaggagggttattgtccatgactggtgtgtggagacaaatgcaggtttataatagatgggatggcatctagcgcaatgactttgccatcacttttagagagctcttggggaccccagtacacaagaggggacgcagggtatatgtagacatctcattctttttcttagtgtgagaataagaatagccatgacctgagtttatagacaatgagcccttttctctctcccactcagcagctatgagatggcttgccctgcctctctactaggctgactcactccaaggcccagcaatgggcagggctctgtcagggctttgatagcactatctgcagagccagggccgagaaggggtggactccagagactctccctcccattcccgagcagggtttgcttatttatgcatttaaatgatatatttattttaaaagaaataacaggagactgcccagccctggctgtgacatggaaactatgtagaatattttgggttccatttttttttccttctttcagttagaggaaaaggggctcactgcacatacactagacagaaagtcaggagctttgaatccaagcctgatcatttccatgtcatactgagaaagtccccacccttctctgagcctcagtttctctttttataagtaggagtctggagtaaatgatttccaatggctctcatttcaatacaaaatttccgtttattaaatgcatgagcttctgttactccaagactgagaaggaaattgaacctgagactcattgactggcaagatgtccccagaggctctcattcagcaataaaattctcaccttcacccaggcccactgagtgtcagatttgcatgcactagttcacgtgtgtaaaaaggaggatgcttctttcctttgtattctcacatacctttaggaaagaacttagcacccttcccacacagccatcccaataactcatttcagtgactcaacccttgactttataaaagtcttgggcagtatagagcagagattaagagtacagatgctggagccagaccacctgagtgattagtgactcagtttctcttagtaattgtatgactcagtttcttcatctgtaaaatggagggttttttaattagtttgtttttgagaaagggtctcactctgtcacccaaatgggagtgtagtggcaaaatctcggctcactgcaacttgcacttcccaggctcaagcggtcctcccacctcaacatcctgagtagctggaaccacaggtacacaccaccatacctcgctaattttttgtatttttggtagagatggggtttcacatgttacacaggatggtctcagactccggagctcaagcaatctgcccacctcagccttccaaagtgctgggattataagcatgattacaggagttttaacaggctcataagattgttctgcagcccgagtgagttaatacatgcaaagagtttaaagcagtgacttataaatgctaactactctagaaatgtttgctagtattttttgtttaactgcaatcattcttgctgcaggtgaaaactagtgttctgtactttatgcccattcatctttaactgtaataataaaaataactgacatttattgaaggctatcagagactgtaattagtgctttgcataattaatcatatttaatactcttggattctttcaggtagatactattattatccccattttactacagttaaaaaaactacctctcaacttgctcaagcatacactctcacacacacaaacataaactactagcaaatagtagaattgagatttggtcctaattatgtctttgctcactatccaataaatatttattgacatgtacttcttggcagtctgtatgctggatgctggggatacaaagatgtttaaatttaagctccagtctctgcttccaaaggcctcccaggccaagttatccattcagaaagcattttttactctttgcattccactgtttttcctaagtgactaaaaaattacactttattcgtctgtgtcctgctctgggatgatagtctgactttcctaacctgagcctaacatccctgacatcaggaaagactacaccatgtggagaaggggtggtggttttgattgctgctgtcttcagttagatggttaactttgtgaagttgaaaactgtggctctctggttgactgttagagttctggcacttgtcactatgcctattatttaacaaatgcatgaatgcttcagaatatgggaatattatcttctggaatagggaatcaagttatattatgtaacccaggattagaagattcttctgtgtgtaagaatttcataaacattaagctgtctagcaaaagcaagggcttggaaaatctgtgagctcctcaccatatagaaagcttttaacccatcattgaataaatccctataggggatttctaccctgagcaaaaggctggtcttgattaattcccaaactcatatagctctgagaaagtctatgctgttaacgttttcttgtctgctaccccatcatatgcacaacaataaatgcaggcctaggcatgactgaaggctctctcataattcttggttgcatgaatcagattatcaacagaaatgttgagacaaactatggggaagcagggtatgaaagagctctgaatgaaatggaaaccgcaatgcttcctgcccattcagggctccagcatgtagaaatctggggctttgtgaagactggcttaaaatcagaagccccattggataagagtagggaagaacctagagcctacgctgagcaggtttccttcatgtgacagggagcctcctgccccgaacttccagggatcctctcttaagtgtttcctgctggaatctcctcacttctatctggaaatggtttctccacagtccagcccctggctagttgaaagagttacccatgcagaggccctcctagcatccagagactagtgcttagattcctactttcagcgttggacaacctggatccacttgcccagtgttcttccttagttcctaccttcgaccttgatcctcctttatcttcctgaaccctgctgagatgatctatgtggggagaatggcttctttgagaaacatcttcttcgttagtggcctgcccctcattcccactttaatatccagaatcactataagaagaatataataagaggaataactcttattataggtaagggaaaattaagaggcatacgtgatgggatgagtaagagaggagagggaaggattaatggatgataaaatctactactatttgttgagaccttttatagtctaatcaattttgctattgttttccatcctcacgctaactccataaaaaaacactattattatctttattttgccatgacaagactgagctcagaagagtcaagcatttgcctaaggtcggacatgtcagaggcagtgccagacctatgtgagactctgcagctactgctcatgggccctgtgctgcactgatgaggaggatcagatggatggggcaatgaagcaaaggaatcattctgtggataaaggagacagccatgaagaagtctatgactgtaaatttgggagcaggagtctctaaggacttggatttcaaggaattttgactcagcaaacacaagaccctcacggtgactttgcgagctggtgtgccagatgtgtctatcagaggttccagggagggtggggtggggtcagggctggccaccagctatcagggcccagatgggttataggctggcaggctcagataggtggttaggtcaggttggtggtgctgggtggagtccatgactcccaggagccaggagagatagaccatgagtagagggcagacatgggaaaggtgggggaggcacagcatagcagcatttttcattctactactacatgggactgctcccctatacccccagctaggggcaagtgccttgactcctatgttttcaggatcatcatctataaagtaagagtaataattgtgtctatctcatagggttattatgaggatcaaaggagatgcacactctctggaccagtggcctaacagttcaggacagagctatgggcttcctatgtatgggtcagtggtctcaatgtagcaggcaagttccagaagatagcatcaaccactgttagagatatactgccagtctcagagcctgatgttaatttagcaatgggctgggaccctcctccagtagaaccttctaaccagctgctgcagtcaaagtcgaatgcagctggttagactttttttaatgaaagcttagctttcattaaagattaagctcctaagcagggcacagatgaaattgtctaacagcaactttgccatctaaaaaaatctgacttcactggaaacatggaagcccaaggttctgaacatgagaaatttttaggaatctgcacaggagttgagagggaaacaagatggtgaagggactagaaaccacatgagagacacgaggaaatagtgtagatttaggctggaggtaaatgaaagagaagtgggaattaatacttactgaaatctttctatatgtcaggtgccattttatgatatttaataatctcattacatatggtaattctgtgagatatgtattattgaacatactataattaatactaatgataagtaacacctcttgagtacttagtatatgctagaatcaaatttaagtttatcatatgaggccgggcacggtggctcatatatgggattacatgcctgtaatcccagcactttgggaggccaaggcaattggatcacctgaggtcaggagttccagaccagcctggccaacatggtgaaaccccttctctactaaaaaatacaaaaaatcagccaggtgtggtggcacgcgtctataatcccagctactcaggaggctgaggcaggagaatcacttgaacccaggaggtggaggttgcagtgagctaagattgcaccactgcactccagcctaggcgacagagtgagactccatctcaaaaaaaaaaaaagaagtttattatatgaattaacttagttttactcacaccaatactcagaagtagattattacctcatttattgatgaggagcccaatgtacttgtagtgtagatcaacttattgaaagcacaagctaataagtagacaattagtaattagaagtcagatggtctgagctctcctactgtctacattacatgagctcttattaactggggactcgaaaatcaaagacatgaaataatttgtccaagcttacagaaccaccaagtagtaaggctaggatgtagacccagttctgctacctctgaagacagtgttttttccacagcaaaacacaaactcagatattgtggatgcgagaaattagaagtagatattcctgccctgtggcccttgcttcttacttttacttcttggcgattggaagttgtggtccaagccacagttgcagaccatacttcctcaaccataattgcatttcttcaggaaagtttgagggagaaaaaggtaaagaaaaatttagaaacaacttcagaataaagagattttctcttgggttacagagattgtcatatgacaaattataagcagacacttgagaaaactgaaggcccatgcctgcccaaattaccctttgaccccttggtcaagctgcaactttggttaaagggagtgtttatgtgttatagtgttcatttactcttctggtctaacccattggctccgtcttcatcctgcagtgacctcagtgcctcagaaacatacatatgtttgtctagtttaagtttgtgtgaaattctaactagcgtcaagaactgagggccctaaactatgctaggaatagtgctgtggtgctgtgataggtacacaagaaatgagaagaaactgcagattctctgcatctccctttgccgggtctgacaacaaagtttccccaaattttaccaatgcaagccatttctccatatgctaactactttaaaatcatttggggcttcacattgtctttctcatctgtaaaaagaatggaagaactcattcctacagaactccctatgtcttccctgatgggctagagttcctctttctcaaaaattagccattattgtatttccttctaagccaaagctcagaggtcttgtattgcccagtgacatgcacactggtcaaaagtaggctaagtagaagggtactttcacaggaacagagagcaaaagaggtgggtgaatgagagggtaagtgagaaaagacaaatgagaagttacaacatgatggcttgttgtctaaatatctcctagggaattattgtgagaggtctgaatagtgttgtaaaataagctgaatctgctgcctaacattaacagtcaagaaatacctccgaataactgtacctccaattattctttaaggtagcatgcaactgtaatagttgcatgtatatatttatcataatactgtaacagaaaacacttactgaatatatactgtgtccctagttctttacacaataaactaatctcatcctcataattctattagctaatacatattatcatcctatatttcagagacttcaagaagttaagcaacttgctcaagatcatctaagaagtaggtggtatttctgggctcatttggcccctcctaatctctcatggcaacatggctgcctaaagtgttgattgccttaattcatcagggatgggctcatactcactgcagaccttaactggcatcctcttttcttatgtgatctgcctgaccctagtagaacttatgaaatttctgatgagaaaggagagaggagaaaggcagagctgactgtgatgagtgatgaaggtgccttctcatctgggtaccagtggggcctctaagactaagtcactctgtctcactgtgtcttagccagttccttacagcttgccctgatgggagatagagaatgggtatcctccaacaaaaaaataaattttcatttctcaaggtccaacttatgttttcttaatttttaaaaaaatcttgaccattctccactctctaaaataatccacagtgagagaaacattcttttcccccatcccataaatacctctattaaatatggaaaatctgggcatggtgtctcacacctgtaatcccagcactttgggaggctgaggtgggtggactgcttggagctcaggagttcaagaccatcttggacaacatggtgataccctgcctctacaaaaagtacaaaaattagcctggcatggtggtgtgcacctgtaatcccagctattagggtggctgaggcaggagaattgcttgaacccgggaggcggaggttgcagtgagctgagatcgtgccactgcactccagcctgggggacagagcacattataattaactgttattttttacttggactcttgtggggaataagatacatgttttattcttatttatgattcaagcactgaaaatagtgtttagcatccagcaggtgcttcaaaaccatttgctgaatgattactatactttttacaagctcagctccctctatcccttccagcatcctcatctctgattaaataagcttcagtttttccttagttcctgttacatttctgtgtgtctccattagtgacctcccatagtccaagcatgagcagttctggccaggcccctgtcggggtcagtgccccacccccgccttctggttctgtgtaaccttctaagcaaaccttctggctcaagcacagcaatgctgagtcatgatgagtcatgctgaggcttagggtgtgtgcccagatgttctcagcctagagtgatgactcctatctgggtccccagcaggatgcttacagggcagatggcaaaaaaaaggagaagctgaccacctgactaaaactccacctcaaacggcatcataaagaaaatggatgcctgagacagaatgtgacatattctagaatatattatttcctgaatatatatatatatatatatacacatatacgtatatatatatatatatatatatttgttgttatcaattgccatagaatgattagttattgtgaatcaaatatttatcttgcaggtggcctctatacctagaagcggcagaatcaggctttattaatacatgtgtatagatttttaggatctatacacatgtattaatatgaaacaaggatatggaagaggaaggcatgaaaacaggaaaagaaaacaaaccttgtttgccattttaaggcacccctggacagctaggtggcaaaaggcctgtgctgttagaggacacatgctcacatacggggtcagatctgacttggggtgctactgggaagctctcatcttaaggatacatctcaggccagtcttggtgcattaggaagatgtaggcaactctgatcctgagaggaaagaaacattcctccaggagagctaaaagggttcacctgtgtgggtaactgtgaaggactacaagaggatgaaaaacaatgacagacagacataatgcttgtgggagaaaaaacaggaggtcaaggggatagagaaggcttccagaagaatggctttgaagctggcttctgtaggagttcacagtggcaaagatgtttcagaaatgtgacatgacttaaggaactatacaaaaaggaacaaatttaaggagaggcagataaattagttcaacagacatgcaaggaattttcagatgaatgttatgtctccactgagcttcttgaggttagcagctgtgagggttttgcaggcccaggacccattacaggacctcacgtatacttgacactgttttttgtattcatttgtgaatgaatgacctcttgtcagtctactcggtttcgctgtgaatgaatgatgtcttgtcagcctacttggtttcgctaagagcacagagagaagatttagtgatgctatgtaaaaacttcctttttggttcaagtgtatgtttgtgatagaaatgaagacaggctacatgatgcatatctaacataaacacaaacattaagaaaggaaatcaacctgaagagtatttatacagataacaaaatacagagagtgagttaaatgtgtaataactgtggcacaggctggaatatgagccatttaaatcacaaattaattagaaaaaaaacagtggggaaaaaattccatggatgggtctagaaagactagcattgttttaggttgagtggcagtgtttaaagggtgatatcagactaaacttgaaatatgtggctaaataactagaatactctttattttttcgtatcatgaatagcagatatagcttgatggccccatgcttggtttaacatccttgctgttcctgacatgaaatccttaatttttgacaaaggggctattcattttcattttatattgggcctagaaattatgtagatggtcctgaggaaaagtttatagcttgtctatttctctctctaacatagttgtcagcacaatgcctaggctataggaagtactcaaagcttgttaaattgaattctatccttcttattcaattctacacatggaggaaaaactcatcagggatggaggcacgcctctaaggaaggcaggtgtggctctgcagtgtgattgggtacttgcaggacgaagggtggggtgggagtggctaaccttccattcctagtgcagaggtcacagcctaaacatcaaattccttgaggtgcggtggctcactcctgtaatcacagcagtttgggacgccaaggtgggcagatcacttgaggtcaggagttggacaccagcccagccaacatagtgaaacctggtctctgcttaaaaatataaaaattagctggacgtggtgacgggagcctgtaatccaactacttgggaggctgaggcaggagaatcgcttgaaccggggaggtggagtttgcactgagcagagatcatgccattgcactccagcctccagagcgagactctgtctaaagaaaaacgaaaacaaacaaacaaacaaacaaacaaaacccatcaaattccctgaccgaacagaattctgtctgattgttctctgacttatctaccattttccctccttaaagaaactgtggaacttccttcagctagaggggcctggctcagaagcctctggtcagcatccaagaaatacttgatgtcactttggctaaaggtatgatgtgtagacaagctccagagatggtttctcatttccatatccacccacccagctttccaattttaaagccaattctgaggtagagactgtgatgaacaaacaccttgacaaaattcaacccaaagactcactttgcctagcttcaaaatccttactctgacatatactcacagccagaaattagcatgcactagagtgtgcatgagtgcaacacacacacacaccaattccatattctctgtcagaaaatcctgttggtttttcgtgaaaggatgttttcagaggctgaccccttgccttcacctccaatgctaccactctggtctaagtcactgtcaccaccacctaaattatagctgttgactcataacaatcttcctgcttctaccactgccccactacaatttcttcccaatatactatccaaattagtcttttcaaaatgtaagtcatatatggtcacctctttgttcaaagtcttctgatagtttcctatatcatttataataaaaccaaatccttacaattctctacaatagttgttcatgcatatattatgtttattacagatacgcatatatatagctctcatataaataaatatatatatttatgtgtatgtgtgtagagtgttttttcttacaactctatgatgtaggtattattagtgtcccaaattttataatttaggacttctatgatctcatcttttattctccccttcaccgaatctcatcctacattggccttattgatattccttgaaaattctaagcatcttacatctttagggtatttacatttgccattccctatgccctaaatatttaatcatagtttcatataaatgggttcctcatcatctatgggtactctctcaggtgttaactttatagtgaggactttcctgccatactacttaaagtagcgataccctttcaccctgtcctaatcacactctggccttcatttcagttttttttttttctccatagcacctaatctcattggtatataacatgtttcatttgcttatttaatgtcaagctctttccactatcaagtccatgaaaacaggaactttattcctctattctgtttttgtgctgtattcttagcaattttacaattttgaatgaaatgaatgagcagtcaaacacatatacaactataattaaaaggatgtatgctgacacatccactgctatgcacacacaaagaaatcagtggagtagagctggaagcgctaagcctgcatagagctagttagccctccgcaggcagagccttgatgggattactgagttctagaattggactcatttgttttgtaggctgagatttgctcttgaaaacttgttctgaccaaaataaaaggctcaaaagatgaatatcgaaaccagggtgttttttacactggaatttataactagagcactcatgtttatgtaagcaattaattgtttcatcagtcaggtaaaagtaaagaaaaactgtgccaaggcaggtagcctaatgcaatatgccactaaagtaaacattattccataggtgtcagatatggcttattcatccatcttcatgggaaggatggccttggcctggacatcagtgttatgtgaggttcaaaacacctctaggctataaggcaacagagctccttttttttttttctgtgctttcctggctgtccaaatctctaatgataagcatacttctattcaatgagaatattctgtaagattatagttaagaattgtgggagccattccgtctcttatagttaaatttgagcttcttttatgatcactgtttttttaatatgctttaagttctggggtacatgtgccatggtggtttgctgcacccatcaacccgtcatctacattaggtatttctcctaatgctatccttcccctagccccccacccccaacaggccccagtgtgtgatgttcccctccctgtgtccatggatcactggttttttttttttttttttttttttttttaaagtctcagttaaatttttggaatgtaatttattttcctggtatcctaggacctgcaagttatctggtcactttagccctcacgttttgatgataatcacatatttgtaaacacaacacacacacacacacacacacacatatatatatataaaacatatatatacataaacacacataacatatttatcgggcatttctgagcaactaactcatgcaggactctcaaacactaacctatagccttttctatgtatctacttgtgtagaaaccaagcgtggggactgagaaggcaatagcaggagcattctgactctcactgcctttggctaggtccctccctcatcacagctcagcatagtccgagctcttatctatatccacacacagtttctgacgctgcccagctatcaccatcccaagtctaaagaaaaaaataatgggtttgcccatctctgttgattagaaaacaaaacaaaataaaataagcccctaagctcccagaaaacatgactaaaccagcaagaagaagaaaatacaataggtatatgaggagactggtgacactagtgtctgaatgaggcttgagtacagaaaagaggctctagcagcatagtggtttagaggagatgtttctttccttcacagatgccttagcctcaataagcttgcggttgtggaagtttactttcagaacaaactcctgtggggctagaattattgatggctaaaagaagcccgggggagggaaaaatcattcagcatcctcacccttagtgacacaaaacagagggggcctggttttccatatttcctcatgatggatgatctcgttaatgaaggtggtctgacgagatcattgcttcttccatttaagccttgctcacttgccaatcctcagttttaaccttctccagagaaatacacattttttattcaggaaacatactatgttatagtttcaatactaaataatcaaagtactgaagatagcatgcataggcaagaaaaagtccttagctttatgttgctgttgtttcagaatttaaaaaagatcaccaagtcaaggacttctcagttctagcactagaggtggaatcttagcatataatcagaggtttttcaaaatttctagacatgagattcaaagccctgcacttaaaatagtctcatttgaattaactctttatataaattgaaagcacattctgaactacttcagagtattgttttatttctatgttcttagttcataaatacattaggcaatgcaatttaattaaaaaaacccaagaatttcttagaattttaatcatgaaaataaatgaaggcatctttacttactcaaggtcccaaaaggtcaaagaaaccaggaaagtaaagctatatttcagcggaaaatgggatatttatgagttttctaagttgacagactcaagttttaaccttcagtgcccatgatgtaggaaagtgtggcataactggctgattctggctttctactcctttttcccattaaagatccctcctgcttaattaacattcacaagtaactctggttgtactttaggcacagtggctcccgaggtcagtcacacaataggatgtctgtgctccaagttgccagagagagagattactcttgagaatgagcctcagccctggctcaaactcacctgcaaacttcgtgagagatgaggcagaggtacactacgaaagcaacagttagaagctaaatgatgagaacacatggactcatagagggaaacaacgcatactggggcctatcagagggtggagggtgagagaaggagaggatcaggaaaaatcactaatggatgctaagcgtaatacctgagtgatgagatcatctatacaacaaacccccttgacattcatttatctatgtaacaaacctgcacatcctgtacacgtacccctgaacttaaaataaaagttgaaaacaagaaagcaacagtttgaacacttgttatggtctattctctcattctttacaattacactagaaaatagccacaggctcctgcaaggcagccacagaatttatgacttgtgatatccaagtcattcctggataatgcaaaatctaacacaaaatctagtagaatcatttgcttacatctatttttgttctgagaatatagatttagatacataatggaagcagaataatttaaaatctggctaatttagaatcctaagcagctcttttcctatcagtggtttacaagccttgtttatatttttcctattttaaaaataaaaataaagtaagttatttgtggtaaagaatattcattaaagtatttatttcttagataataccatgaaaaacattcagtgaagtgaagggcctactttacccaacaagaatctaatttatataatttttcatactaatagcatctaagaacagtacaatatttgactcttcaggttaaacatatgtcataaattagccagaaagatttaagaaaatattggatgtttccttgtttaaattaggcatcttacagtttttagaatcctgcatagaacttaagaaattacaaatgctaaagcaaacccaaacaggcaggaattaatcttcatcgaatttgggtgtttctttctaaaagtcctttatacttaaatgtcttaagacatacatagattttattttactaattttaattatacagacaataaatgaatattcttactgattactttttctgactgtctaatctttctgatctatcctggatggccataacacttatctctctgaactttgggcttttaatataggaaagaaaagcaataatccatttttcatggtatctcatatgataaacaaataaaatgcttaaaaatgagcaggtgaagcaatttatcttgaaccaacaagcatcgaagcaataatgagactgcccgcagcctacctgacttctgagtcaggatttataagccttgttactgagacacaaacctgggcctttcaatgctataacctttcttgaagctcctccctaccacctttagccataaggaaacatggaatgggtcagatccctggatgcaagccaggtctggaaccataggcagtaaggagagaagaaaatgtgggctctgcaactggctccgagggagcaggagagaatcaaccccatactctgaatctaagagaagactggtgtccatactctgaatgggaagaatgatgggattacccatagggcttgttttagggagaaacctgttctccaaactcttggccttgagatacctggtccttattccttggactttggcaatgtctgaccctcacattcaagttctgaggaagggccactgccttcatactgtggatctgtagcaaattccccctgaaaacccagagctgtatcttaattgtttaaaaaaattatattatctcaaggactgttcttctctgagtagccaagctcagcttggttcaagctacaagcagctgcgctgctttttgtctagtcattgttcttttatttcagtggatcaaatacgttctttccaaacctaggatcttgtcttcctggactatatattttatccacgaagtcttaatctggggtccacagaacactagggggctggtgaagtttatagaaaaaaaatctgtatttttacttacatgtaactgaaatttagcattttcttctactttgaatgcaaaggacaaactagaatgacatcatcagtacctattgcatagttataaagagaaaccacagatattttcatactacaccataggtattgcagatctttttgtttttgtttttgtttgagatggagtttcgctcttattgcccaggctggagtgcagtggcatgatttcggctcactgcaacctccccttcctgcattcaagcaattctcctgccttggcctccagagtagctggggattacaggcacctgccaccatgccagtctaatttttgtatttttagtagagaatgggtttcgccatgttggccaggctggtcttgaactcctgacctcagatgatctgcccgccttggcctcctgaagtgctgggattataggtgtgagccaccacgcctggcccattgcagatatttttaattcacatttatctgcatcactacttggatcttaaggtagctgcagacccaatcccagatctaatgctttcataaagaagcaaatataataaatactataccacaaatgtaatgtttgatgtctgataatgatatttcagtgtaattaaacttagcactccatgtatattatttgatgcaataaaaacatatttttttagcacttacagtctgccaaactggcctgtgacacaaaaaaagtttaggggaattcccctagttttgtctgtgttagccaatggttagaatatatgctcagaaagataccattggttaatagctaaaagaaaatggagtagaaattcagtggcctggaataataacaatttgggcagtcattaagtcaggtgaagacttctggaatcatgggagaaaagcaagggagacattcttacttgccacaagtgtttttttttttttttttttttatcacaaacataagaaaatataataaataacaaagtcaggttatagaagagagaaacgctcttagtaaacttggaatatggaatccccaaaggcacttgacttgggagacaggagccatactgctaagtgaaaaagacgaagaacctctagggcctgaacatacaggaaattgtaggaacagaaattcctagatctggtggggcaaggggagccataggagaaagaaatggtagaaatggatggagacggaggcagaggtgggcagatcatgaggtcaagagatcgagaccatcctggcaaacatggtgaaatcccgtctctactaaaaataaaaaaattagctgggcatggtggcatgcgcctgtagtcccagctgctcgggaggctgaggcaggagaatcgtttgaacccaggaggcgaaggttgcagtgagctgagatagtgccattgcactccagtctggcaacagagtgagactccgtctcaaaaaaaaaaaaaagaaagaaagaaaagaaaaagaaaaaagaaaaaataaatggatgtagaacaagccagaaggaggaactgggctggggcaatgagattatggtgatgtaagggacttttatagaattaacaatgctggaatttgtggaactctgcttctattattcccccaatcattacttctgtcacattgatagttaaataatttctgtgaatttattccttgantcccaaaatattgaggtaaataacaatggtattataaaagggcagattaagtgatatagcataagcaatattcttcaggcacatggatcgaattgaatacactgtaaatcccaacttccagtttcagctctaccaagtaaagagctagcaagtcatcaaaatggggacatacagaaaaaaaaaaggacactagaggaataatataccctgactcctagcctgattaatatatcgattcacttttactctgtttggtgacaaattctggctttaaataattttaggattttaggcttctcagctcccttcccagtgagaagtataagcaggacagcaggcaagcaagaagagagcccaaggcaatactcacaaagtagccagtgtcccctgtggtcatagagaaatggaaagagagaggantccccccttggagccactgggtggtaatcctttccgtccgttcctctctagggaatcaccccaaggtactgtactttgggattaaggctttagtcccactgtggactacttgctattctgttcagtttctgaaggaactatgtacggtttttgtctccctagagaaactaaggtacagaagttttgtttacaatgcactccttaagagagctagaactgggtgaagantcctggtttaaccagccttaatttcctttccctgggccccggtttggtcacgtcactgtcaccacctttaaggcaaatgttaaatgcgctttggctgaactttttcctattttgagatttgctcctttatatgaggctttcttggaaaaggagaatgggagagatggatatcattttggaagatgatgaagagggtaaaaaagggtacaaatggaaatttgtgttgcagatagtatgaggagccaacaaaaaagagcctcaggatccagcacacattatcacaaacttagtgtccatccatcactgctgaccctctccggacctgactccacccctgaggacacaggtcagccttgaccaatgacttttaagtaccatggagaacagggggccagaacttcggcagtaaagaataaaaggccagacagagaggcagcagcacatatctgcttccgacacagctgcaatcactagcaagctctcaggcctggcatcatggtgcattttactgctgaggagaaggctgccgtcactagcctgtggagcaagatgaatgtggaagaggctggaggtgaagccttgggcaggtaagcattggttctcaatgcatgggaatgaagggtgaatattaccctagcaagttgattgggaaagtcctcaagattttttgcatctctaattttgtatctgatatggtgtcatttcatagactcctcgttgtttacccctggacccagagattttttgacagctttggaaacctgtcgtctccctctgccatcctgggcaaccccaaggtcaaggcccatggcaagaaggtgctgacttcctttggagatgctattaaaaacatggacaacctcaagcccgcctttgctaagctgagtgagctgcactgtgacaagctgcatgtggatcctgagaacttcaaggtgagttcaggtgctggtgatgtgattttttggctttatattttgacattaattgaagctcataatcttattggaaagaccaacaaagatctcagaaatcatgggtcgagcttgatgttagaacagcagacttctagtgagcataaccaaaacttacatgattcagaactagtgacagtaaaggactactaacagcctgaattggcttaacttttcaggaaatcttgccagaacttgatgtgtttatcccagagaattgtattatagaattgtagacttgtgaaagaagaatgaaatttggcttttggtagatgaaagtccatttcaaggaaatagaaatgccttattttatgtgggtcatgataattgaggtttagaagagatttttgcaaaaaaaataaaagatttgctcaaagaaaaataagacacattttctaaaatatgttaaatttcccatcagtattgtgaccaagtgaaggcttgtttccgaatttgttggggattttaaactcccgctgagaactcttgcagcactcacattctacatttacaaaaattagacaattgcttaaagaaaaacagggagagagggaacccaataatactggtaaaatggggaagggggtgagggtgtaggtaggtagaatgttgaatgtagggctcatagaataaaattgaacctaagctcatctgaattttttgggtgggcacaaaccttggaacagtttgaggtcagggttgtctaggaatgtaggtataaagccgtttttgtttgtttgtttgttttttcatcaagttgttttcggaaacttctactcaacatgcctgtgtgttattttgtcttttgcctaacagctcctgggtaacgtgatggtgattattctggctactcactttggcaaggagttcacccctgaagtgcaggctgcctggcagaagctggtgtctgctgtcgccattgccctggcccataagtaccactgagttctcttccagtttgcaggtcttcctgtgaccctgacaccctccttctgcacatggggactgggcttggccttgagagaaagccttctgtttaataaagtacattttcttcagtaatcaaaaattgcaattttatcttctccatcttttactcttgtgttaaaaggaaaaagtgttcatgggctgagggatggagagaaacataggaagaaccaagagcttccttaagaaatgtatgggggcttgtaaaattaatgtggatgttatgggagaattcccaagattcccaaggaggatgatatgatggagaaaaatctttatcggggtgggaaaatggttaattaagtggcagagactcctaggcagtttttactgcaccggggaaagaaggagctgttgtggtacctgagaaagcagatttgtggtacatgtcacttttcattaaaaacaaaaacaaaacaaaacaaaacttcatagatatccaagatataggctgagaattactattttaatttactcttatttacattttgaagtagctagcttgtcacatgttttatgaaattgatttggagataagatgagtgtgtatcaacaatagcctgctctttccatgaaggattccattatttcatgggttagctgaagctaagacacatgatatcattgtgcattatcttctgatacaatgtaacatgcactaaaataaagttagagttaggacctgagtgggaaagtttttggagagtgtgatgaagactttccgtgggagatagaatactaataaaggcttaaattctaaaaccagcaagctagggcttcgtgacttgcatgaaactggctctctggaagtagaagggagagtaagacatacgtagaggactaggaaagaccagatagtacagggcctggctacaaaaatacaagcttttactatgctattgcaatactaaacgataagcattaggatgttaagtgactcaggaaataagattttgggaaaaagtaatctgcttatgtgcacaaaatggattcaagtttgcagataaaataaaatatggatgatgattcaaggggacagatacaatggttcaaacccaagaggagcagtgagtctgtggaattttgaaggatggacaaaggtggggtgagaaagacatagtattcgacctgactgtgggagatgagaaggaagaaggaggtgataaatgactgaaagctcccagactggtgaagataacaggaggaaaccatgcacttgaccctggtgactctcatgtgtgaagggtagagggatattaacagatttactttttaggaagtgctagattggtcagggagttttgaccttcaggtcttgtgtctttcatatcaaggaacctttgcattttccaagttagagtgccatattttggcaaatataactttattagtaattttatagtgctctcacattgatcagactttttcctgtgaattacttttgaatttggctgtatatatccagaatatgggagagagacaaataattattgtagttgcaggctatcaacaatactggtctctctgagccttataacctttcaatatgccccataaacagagtaaacagggattattcatggcactaaatattttcacctaggtcagtcaacaaatggaggcaatgtgcattttttgatacatatttttatatatttatggggcatgtgatacttacatgcctagaacatgtgactgattaagtctagatatttaggatatccattactttgagcatttatcatttctatgtattgagaaaatttcaaatcctcatttctgaccattttgaaatatataataaatagtaattaactatagtcaccctactcaaatatcaacattataaactaactaatccttctttccacttttttaccaaccaacatctcttaaatcccctgccatacacatcacacatttttcagctctgataactatcattctactctcataccaccatgagaccacttttttagctccacagatgaataaaaacatgtgatatttgactttctgtatctggcttattttattatctatctctttggcataccaagagtttgtttttgttctgcttcagggctttcaattaacataatgacctctggttccatccatgttgctacaaatgacaagatttcattctttttcatggcaaaatagtactgtgcaaaaaatacaattttttaatccgttcatctgttgatagacacttaggttgatcccaaaccttaactattgtgaataggtgcttcaataaacatgagtgtaatgtgtccattggatatactgatttcctttcttttggataaataaccactagtgagattgctggattgtatgatagttctgtttttagtttattgagaaatcttcatactgttttccataatggttgtactattttacattcccaccaacagtgtgtaagaaagagttcccttttctccatatcctcacaaggatctgttattttttgtcttttttgttaatagcattttaactagagtaagtagatatctcattgtagttttgatttgcatttccctgatcattagtgatgttgagattttttcatatgtttgttggtcatttgtatatctttttctgagattgtctgttcatgtccttatcctacttttattgggattgttgttattttcttgataatcattgtgtcattttagagcctggatattattcttttgtcagatgtatagattgtgaagattttctcctctgtgggttgtctgtttattctgcagactcttccttttgccatgcaaaagctctttagtttaatttagtcccagatattttctttgtttttatgtgtttgcatttgtgttcttgtcatgaaatcctttcctaagccaatgtgtagaagggtttttccgatgttattttctagaattgttacagtttcaggcttagatttaagtccttgatccatcttaagttgatttttgtataaggtgagagatgaagatccagtttcattctcctacatgtagcttgccagctatcccgactcatttgttgaatagggtgccctttcccatttatgtttttgtttgctttgtcaaagatcagttcggatgtaagtatttgagtttatttctgggttctctattctgttccattggtccgatgtgcctatttgtacaccagcatcatgctgtgtttttggtgactatggccttattgtatagtttgaaatgaggtaatgtaatgccattcagatttgttcttttttttagacttgcttgtttattgggctcttttttggttccataagaattttaggattgttttttctagttctgtgaaggctaatggtggtatttatgggaattgcaatgcaatttgtaggttgcttctggcattatggccattttcacaatattgattctacccatctatgagaatggcatgtgtttccatttgtttgtgtcttatatgattactatcagccgtgttttgtagttttccttgtagatgtctttcacctccttggttaggtatatattcctaagtttttgttttgttttgttttgttttttgcagctattgtaaaaggggttgagttattgattttattctcatcttggtcattgctggtatgtaagaaagcaactcattggtgtacgttaattttgtatccagaaactttgctgaattattttatcagttctagggggttttggaggagtctttagagttttctacatacacaatcatatcatcagcaaacagtgacagtttgactttctctttaacaatttggatgtgctttacttgtttctcttgtctgattgctcttgctaggacttccagtaatatgttaaagagaagtggtgagagtgggtatccttgtctcattccagttttcagacagaatgcttttaactttttcccattcaatataatgttggctgtgtgtttaccatagctggcttttattacattgaggtatgtcctttgtaaaccgattttgctgagttttagtcataaagtgatgttgaattttgttgaatgcagtttctgtggctattgagataatcacatgatttttgtttccaattctctttatgttgtgtatcacacttattgacttgcgtatgttaaaccatccgtgcatccctcgcatgaaaccacttgatcatgggttttgatatgccgtgtgggatgctattagctatattttgtcaaggatgttggcatctatgttcatcagggatattgatctgtagtgttttttttttttggttatgttctttcccagttttggtattaaggtgatactggcttcatagaatgatttagggaggattctctctttctctatcttgtagaatactgtcaataggattggtatcaattcttctttgaatgtctggtagaattcgaacgtctcctttaggttttctagtttattcatgtaaaggtgttcatagtaaccttgaataatcttttgtatttctgtggtatcagtaatagtatctcctgttttgtttctaactgagtttatttgcacttctctcctcttttcttggttaatcttgctaatggtctatcagttttatttatcttttcaaagaaccagctttttatttcatttagcttttgtatttttttgcagttgttttaatttcatttagttctcctcttatcttagttattccctttcttttgctgggttttggttctgtttgtttttgtttctctagtttcttgtggtgtgaccttatattgtctgtcctctttcagactctttgacatcgacatttagggctgtgaactttccttttagcaccatctttgctgtatcctagaggttttgataggtgtgtcactattgtcggtcagttcaagtaattttgttgttcttattatactttaagttctgggatacatgtgcagaatgtgcaggtttgttacataggtatagatgtgccatggtggtttgctgctcccatcaacctgtcatctacattaggtatttcttttaatgttatccctctcctaaccccctcaccccccgacaggccctggtgtgtgatgttcccctccctgtgtccatgtgttctcattgttcaactcccacttatgagtgagaacgtgtggtgtttggtttctctgttcctgtgttagtttgctcagaatgatgtttccaccttcaccatgtccctgcaaagacatgaactcatcattttatggctgcatatattccatggtgtatatgtgccacattttctttatccattatatcgctgatggccatttgggttggttccaagtctttggtattgtgaatagtgccgcaataaacatacgtgtgcacatgtctttatagtagaatgatttctaattctttgggtatatacccagtaatgggattgctgggtcaaacagtatttctggttctagatccttgaggaattgccacactgtcttccacaatggttgaactaatttacacacccatcaacagtgtaaaatttttcctattcttccacatcctctccagcaccttttgtttcctgactttttaataattgccattctaactggcatgagatggtatctcattgtggttttgatttgcatttctctaatgaccagtgatgatgagcttcttttcatgtgtttcttggccacataaatgacttctttagagaagcatctgttcatatcctttgtccactttttgatggggtcgttaggttttttcttgtaaatttgttgaagttctttgtagattttggatgttagccctttgtcagatggatagattggcaaaaattttctcccattctgtaggttgcctgttcactctgatgatagtcttttgctgtgcagaagctctttagtttaattagatcccatatgtcaattttggcctttgttgtcattgcttttgatgtttagtcgtggaattttgcccatgcctatgtcctgaatggtattgcctaggttatcttctaggatttttatggttttaggttgcacatttaagtctttaatccaccttgagttaatttttgtataaggtgtaaggaaggggtacagtttcagttttatgcatattgctagccagtttttccagcaccatttattaaatagggaattctttctccattgcttttgtgatgtttgtcaaagatcagatggtcgtagatgtgtggcattatttctgaggcttctgttctgttccactggtctatatatctgttttggtaccagtaccatgctgtttttgttactgtagccttgtagtatagcttgaagtcaggtagcatcatgcctccagctttgttctttttgtttaggattgtcttggctatatgggctcttttttgattccatatgacatttaaagtagttttttctaattctttgaaaaaagtcagtggtagcttgatggggatagcattgaatctataaattactttgggcagtatggccattttaaagatattgattctttctatctatgagcatggaatgtttttccatttgtttgtgtcctctcttatttccttgagcagtgagtggtttgtagctctccttgaagaggttcttcacatcccttataagttgtatttctaggtattttattttattctctttgcagcaattgtgaatgggagttcacccatgatttggctctctgcttgtctattattggtgtataggaatgcttgtgatttttgcacactgattttgtatcttgagactttgctgaagctgtttatcagcttaagattttgggctgagatgacagggtcttctaaatatacaatcatgtcatctgcaaacagagacaatttgacttcctctcttcctatttgaatatgctttatttctttctcttgcctgattgtcctggcgagaacttccaatactatgttgagtaagagtggcgagagggcatccttgtcttgtgccggttttcaaagcaaatgatttttaaatttccgtcttgatttcattgttgacccaatgatcattcaggagcaggttatttaatttccctgtatttgcatggttttgaaggttccttttgtagttgatttccaattttattctactgtggtctgagagagtgcttgatataatttcaatttttaaaaatttattgaggcttgttttgtggcatatcatatggcctatcttggagaaagttccatgtgctgatgaatagaatgtgtattctgcagttgttgggtagaatgtcctgtaaatatctgttaagtccatttgttctttaaatccattgtttctttgtagactgtcttgatgacctgcctagtgcagtcagtggagtattgaagtcccccactattattatgttgctgtctagtagtaattgttttataaatttgggatctccagtattagatgcatatatattaagaattgtaatattctcccattggacaagggcttttatcattatatgatgtccctctttgtcttttttaactgctgtttctttaaagtttgttttgtctgacataagaatagctgctttggctcgcttttggtgtccatttgtgtggaatgtcattttccacccctttaccttaagtttatgtgagtccttatgtgttaggtgagtctcctgaaggcggcagataactggttggtgaattctattcattctgcaattctgtatcttttaagtggagcatttagtccatttacattcaacatcagtattgaggtgtgaggtgactattccattcttcgtggtatttgttgcctgtgtatctttttatctgtatttttgttgtatatgtcctatgggatttatgctttaaagaggttctgttttgatgtgcttccagggtttatttcaagatttagagctccttttatcattcttgtagtgttggcttggtagtgccgaattctctcagcatttgtttttctgaaaaacactgtgtattttcttcatttgtgaagcttagtttcactggatataaaattcttggctgataattgttttgtttaagaaggctgaagatagggccatattcacttctagcttttacggtttctgctgagaaatctgctgttaatctgataggttttctttcataggttacctggtagtttcacctcacagctcttaagattctctttgtctttagataactttggatactctgatgacaatgtacctaggcaatgatatttttgcaatgaatttcccaggtgtttattgagcttctttgtatttggatatctaggtctctagcaaggagggggaagttttccttgattatttccatggacaagttttccaaacttttagatttctcttctttctcaggaatgctgattattcttaggtttgattgtttaacataatcccagatttcttggaggctttgttcatattttcttattcttttttctttgtctttgttggattgggtaattcaaaaactttgtcttcaagctctgaatttcttctgcttggattctattgctgagactttctagagcattttgcatttctataagtgcatccattcatccattgtttcctgaagttttgaatgttttttatttatgctatctctttaactgaagatttctcccctcatttcttgtatcatatttttggtttttttaaaattggacttcaccttcctcggatgcctccttgattagcttaataactgaccttctgaattatttttcaggtaaatcagggatttcttcttggtttggatgcattgctggtgagctagtatgattttttggggggtgttaaagaaccttgtttttcatattaccagagttagttttctggttccttctcacttgggtaggctctgtcagagggaaagtctaggcctcaaggctgagacttttgtcccagcaggtgttcccttgatgtagcacagtcccccttttcctaggacgtggggcttcctgagagccgaactgtagtgattgttatctctcttctggatctagccacccatcaggtctaccagactccaggctggtactggggtttgtctgcacagagtcttgtgacgtgaaccatctgtgggtctctcagccatagatacaaccacctgctccaatggaggtggtagaggatgaaatgaactctgtgagggtccttacttttggttgttcaatgcactatctttttgtgctggttggcctcctgccaggaggtggcactttctagaaagcatcagcagaggcagtcaggtggtggtggctgggggggctggggcactagaactcccaagaatatatgccctttgtcttcagctactagggtgagtaaggaaggaccatcaggtgggggcaggactagtcgtgtctgagctcagagtctccttgggcaggtctttctgtggctactgtgggaggatgggggtgtagtttccaggtcaatggatttatgttcctaggacaattatggctgcctctgctgtgtcatgcaggtcatcaggaaagtgggggaaagcaagcagtcacgtgacttgcccagctcccatgcaactcaaaaggttggtctcacttccagcgtgcaccctcccccgcaacagctccgaatctgtttccatgcagtcagtgagcaaggctgagaacttgcccaggctaccagctgcgaaaccaagtagggctgtcctacttccctgccagtggagtctgcacaccaaattcatgtccccccaccaacccccccactgcccagcccctagatctggccaggtggagattttctttttcctgtctcttttcccagttcctctggcagccctcccaaatgacccctgtgaggcaaggcagaaatggcttcctaggggacccagagagcccacagggcttttcccgctgcttcctctacccctgtattttgcttggccctctaaattgactcagctccaggtaaggtcagaatcttctcctgtggtctagatcttcaggttcccagtgaggatgtgtgtttgggggtagacggtcccccttttccacttccacagtttgggcactcacaatatttggggtgtttcccgggtcctacatgagcaatctgcttctttcagagggtgtgtgcgttctctcagctttcttgaatttatttctgcaggtggttctgcaaaaaaaattcctgatgggagacttcacatgctgctctgtgcatccgagtgggagctgcaatgtacttctgctgccacccatctgccatcaccctctaatttgtcggtaatatgcatttttaatcaatctttttttctctctctctcttttcttctcccccaaaactatactgccctttgatatcaaggaatcaaggccgtgatgttgaggggtgggcagtggatacactctttaccccttagggagcatatctagatttagatattgccaattcaagataacttaattgaaagcaaattcataatgaatacacacacacacacacacatctgcatgacaagatttttaatagttgaaagaataactaataattgtccacaggcaataagggctttttaagcaaaacagttgtgataaaacaggtcattcttagaatagtaatccagccaatagtacaggttgcttagagattatgacattaccagagttaaaattcaataatggcttctcactccctaccactgaggacaagtttatgtccttaggtttatgcttccctgaaacaataccacctgctattctccactttacatatcaacggcactggttctttatctaactctctggcacagcaggagtttgttttcttctgcttcagagctttgaatttactatttcagcttctaaactttatttgcaatgccttcccatggcagactccttctgtcattttgcctctgttcgaaaactttttccttaatttcattcttagttaataatatctgaaattattttgttgtttaacttaattattaattttatgtatgttctacctagatataatcttctagaggattgttttattctctgacttatttaacttaaatgcccactacctttaaaaattatgacatttatttaacagatatttgctgaacaaatgtttgaaaatacatgggaaagaatgcttgaaaacacttgaaattgcttgtgtaaagaaacagttttatcagttaggatttaatcaatgtcagaagcaatgatataggaaaaatcgaggaataagacagttatggataaggagaaatcaacaaactcttaaaagatattgcctcaaaagcataagaggaaataagggtttatacatgacttttagaacactgcctgggtttttggataaatggggaagttgttggaaaacaggagggatcctagatattccttagtctgaggaggagcaattaagattcacttgtttagaggctgggagtggtggctcacgcctgtaatcccagaattttgggaggccaaggcaggcagatcacctgaggtcaagagttcaagaccaacctggccaacatggtgaaatcccatctctacaaaaatacaaaaattagacaggcatgatggcaagtgcctgtaatcccagctacttgggaggctgaggaaggagaattgcttgaacctggaaggcaggagttgcagtgagccgagatcataccactgcactccagcctgggtgacagaacaagactctgtctcaaaaaaaaaaaagagagattcaaaagattcacttgtttaggccttagcgggcttagacaccagtctctgacacattcttaaaggtcaggctctacaaatggaacccaaccagactctcagatatggccaaagatctatacacacccatctcacagatcccctatcttaaagagaccctaatttgggttcacctcagtctctataatctgtaccagcataccaataaaaatctttctcacccatccttagattgagagaagtcacttattattatgtgagtaactggaagatactgataagttgacaaatctttttctttcctttcttattcaacttttattttaacttccaaagaacaagtgcaatatgtgcagctttgttgcgcaggtcaacatgtatctttctggtcttttagccgcctaacactttgagcagatataagccttacacaggattatgaagtctgaaaggattccaccaatattattataattcctatcaacctgataagttaggggaaggtagagctctcctccaataagccagatttccagagtttctgacgtcataatctaccaaggtcatggatcgagttcagagaaaaaacaaaagcaaaaccaaacctaccaaaaaataaaaatcccaaagaaaaaataaagaaaaaaacagcatgaatacttcctgccatgttaagtggccaatatgtcagaaacagcactgagttacagataaagatgtctaaactacagtgacatcccagctgtcacagtgtgtggactattagtcaataaaacagtccctgcctcttaagagttgttttccatgcaaatacatgtcttatgtcttagaataagattccctaagaagtgaacctagcatttatacaagataattaattctaatccatagtatctggtaaagagcattctaccatcatctttaccgagcatagaagagctacaccaaaaccctgggtcatcagccagcacatacacttatccagtgataaatacacatcatcgggtgcctacatacatacctgaatataaaaaaaatacttttgctgagatgaaacaggcgtgatttatttcaaataggtacggataagtagatattgaagtaaggattcagtcttatattatattacataacattaatctattcctgcactgaaactgttgctttataggatttttcactacactaatgagaacttaagagataatggcctaaaaccacagagagtatattcaagaataagtatagcacttcttatttggaaaccaatgcttactaaatgagactaagacgtgtcccatcaaaaatcctggacctatgcctaaaacacatttcacaatccctgaacttttcaaaaattggtacatgctttaactttaaactacaggcctcactggagctacagacaagaaggtgaaaaacggctgacaaaagaagtcctggtatcttctatggtgggagaagaaaactagctaaagggaagaataaattagagaaaaattggaatgactgaatcggaacaaggcaaaggctataaaaaaaattaagcagcagtatcctcttgggggccccttccccacactatctcaatgcaaatatctgtctgaaacggttcctggctaaactccacccatgggttggccagccttgccttgaccaatagccttgacaaggcaaacttgaccaatagtcttagagtatccagtgaggccaggggccggcggctggctagggatgaagaataaaaggaagcacccttcagcagttccacacactcgcttctggaacgtctgaggttatcaataagctcctagtccagacgccatgggtcatttcacagaggaggacaaggctactatcacaagcctgtggggcaaggtgaatgtggaagatgctggaggagaaaccctgggaaggtaggctctggtgaccaggacaagggagggaaggaaggaccctgtgcctggcaaaagtccaggtcgcttctcaggatttgtggcaccttctgactgtcaaactgttcttgtcaatctcacaggctcctggttgtctacccatggacccagaggttctttgacagctttggcaacctgtcctctgcctctgccatcatgggcaaccccaaagtcaaggcacatggcaagaaggtgctgacttccttgggagatgccataaagcacctggatgatctcaagggcacctttgcccagctgagtgaactgcactgtgacaagctgcatgtggatcctgagaacttcaaggtgagtccaggagatgtttcagcactgttgcctttagtctcgaggcaacttagacaactgagtattgatctgagcacagcagggtgtgagctgtttgaagatactggggttgggagtgaagaaactgcagaggactaactgggctgagacccagtggcaatgttttagggcctaaggagtgcctctgaaaatctagatggacaactttgactttgagaaaagagaggtggaaatgaggaaaatgacttttctttattagatttcggtagaaagaactttcacctttcccctatttttgttattcgttttaaaacatctatctggaggcaggacaagtatggtcgttaaaaagatgcaggcagaaggcatatattggctcagtcaaagtggggaactttggtggccaaacatacattgctaaggctattcctatatcagctggacacatataaaatgctgctaatgcttcattacaaacttatatcctttaattccagatgggggcaaagtatgtccaggggtgaggaacaattgaaacatttgggctggagtagattttgaaagtcagctctgtgtgtgtgtgtgtgtgtgtgcgcgcgtgtgtttgtgtgtgtgtgagagcgtgtgtttcttttaacgttttcagcctacagcatacagggttcatggtggcaagaagataacaagatttaaattatggccagtgactagtgctgcaagaagaacaactacctgcatttaatgggaaagcaaaatctcaggctttgagggaagttaacataggcttgattctgggtggaagcttggtgtgtagttatctggaggccaggctggagctctcagctcactatgggttcatctttattgtctcctttcatctcaacagctcctgggaaatgtgctggtgaccgttttggcaatccatttcggcaaagaattcacccctgaggtgcaggcttcctggcagaagatggtgactggagtggccagtgccctgtcctccagataccactgagctcactgcccatgatgcagagctttcaaggataggctttattctgcaagcaatacaaataataaatctattctgctaagagatcacacatggttgtcttcagttcttttttttatgtctttttaaatatatgagccacaaagggttttatgttgagggatgtgtttatgtgtatttatacatggctatgtgtgtttgtgtcatgtgcacactccacacttttttgtttacgttagatgtgggttttgatgagcaaataaaagaactaggcaataaagaaacttatacatgggagcgtctgcaagtgggagtaaaaggtgcaggagaaatctggttggaagaaagacctctataggacaggactcctcagaaacagatgttttggaagagatggggaaaggttcagtgaagggggctgaacccccttccctggattgcagcacagcagcgaggaaggggctcaacgaagaaaaagtgttccaagctttaggaagtcaaggtttaggcagggatagccattctattttattaggggcaatactatttccaacggcatctggcttttctcagcccttgtgaggctctacggggaggttgaggtgttagagatcagagcaggaaacaggtttttctttccacggtaactacaatgaagtgatccttactttactaaggaactttttcattttaagtgttgacgcatgcctaaagaggtgaaattaatcccatacccttaagtctacagactggtcacagcatttcaaggaggagacctcattgtaagcttctagggaggtggggacctaggtgaaggaaatgagccagcagaagctcacaagtcagcatcagcgtgtcatgtctcagcagcagaacagcacggtcagatgaaaatatagtgtgaagaatttgtataacattaattgagaaggcagattcactggagttcttatataattgaaagttaatgcacgttaataagcaagagtttagtttaatgtgatggtgttatgaacttaacgcttgtgtctccagaaaattcacatgctgaatccccaactcccaattggctccatttgtgggggaggctttggaaaagtaatcaggtttagaggagctcatgagagcagatccccatcatagaattattttcctcatcagaagcagagagattagccatttctcttccttctggtgaggacacagtgggaagtcagccacctgcaacccaggaagagagccctgaccaggaaccagcagaaaagtgagaaaaaatcctgttgttgaagtcacccagtctatgctattttgttatagcaccttgcactaagtaaggcagatgaagaaagagaaaaaaataagcttcggtgttcagtggattagaaaccatgtttatctcaggtttacaaatctccacttgtcctctgtgtttcagaataaaataccaactctactactctcatctgtaagatgcaaatagtaagcctgatcccttctgtctaacttcgaattctattttttcttcaacgtactttaggcttgtaatgtgtttatatacagtgaaatgtcaagttctttctttatatttctttctttcttttttttcctcagcctcagagttttccacatgcccttcctaccttcaggaacttctttctccaaacgtcttctgcctggcctccattcaaatcataaaggacccacttcaaatgccatcactcactaccatttcacaattcgcactttctttctttgtcctttttttttttagtaaaacaagtttataaaaaattgaaggaataaatgaatggctacttcataggcagagtagacacaagggctactggttgccgatttttattgttatttttcaatagtatgctaaacaaggggtagattatttatgctgcccatttttagaccataaaagataacttcctgatgttgccatggcattttttttccttttaattttatttcatttcattttaatttcgaaggtacatgtgcaggatgtgcaggcttgttacatgggtaaatgtgtgtctttctggccttttagccatctgtatcaatgagcagatataagctttacacaggatcatgaaggatgaaagaatttcaccaatattataataatttcaatcaacctgatagcttaggggataaactaatttgaagatacagcttgcctccgataagccagaattccagagcttctggcattataatctagcaaggttagagatcatggatcactttcagagaaaaacaaaaacaaactaaccaaaagcaaaacagaaccaaaaaacctccataaatacttcctacccagttaatggtccaatatgtcagaaacagcactgtgttagaaataaagctgtctaaagtacactaatattcgagttataatagtgtgtggactattagtcaataaaaacaacccttgcctctttagagttgttttccatgtacacgcacatcttatgtcttagagtaagattccctgagaagtgaacctagcatttatacaagataattaattctaatccacagtacctgccaaagaacattctaccatcatctttactgagcatagaagagctacgccaaaaccctgggtcatcagccagcacacacacttatccagtggtaaatacacatcatctggtgtatacatacatacctgaatatggaatcaaatatttttctaagatgaaacagtcatgatttatttcaaataggtacggataagtagatattgaggtaagcattaggtcttatattatgtaacactaatctattactgcgctgaaactgtggtctttatgaaaattgttttcactacactattgagaaattaagagataatggcaaaagtcacaaagagtatattcaaaaagaagtatagcactttttccttagaaaccactgctaactgaaagagactaagatttgtcccgtcaaaaatcctggacctatgcctaaaacacatttcacaatccctgaacttttcaaaaattggtacatgctttagctttaaactacaggcctcactggagctacagacaagaaggtaaaaaacggctgacaaaagaagtcctggtatcctctatgatgggagaaggaaactagctaaagggaagaataaattagagaaaaactggaatgactgaatcggaacaaggcaaaggctataaaaaaaattaagcagcagtatcctcttgggggccccttccccacactatctcaatgcaaatatctgtctgaaacggtccctggctaaactccacccatgggttggccagccttgccttgaccaatagccttgacaaggcaaacttgaccaatagtcttagagtatccagtgaggccaggggccggcggctggctagggatgaagaataaaaggaagcacccttcagcagttccacacactcgcttctggaacgtctgagattatcaataagctcctagtccagacgccatgggtcatttcacagaggaggacaaggctactatcacaagcctgtggggcaaggtgaatgtggaagatgctggaggagaaaccctgggaaggtaggctctggtgaccaggacaagggagggaaggaaggaccctgtgcctggcaaaagtccaggtcgcttctcaggatttgtggcaccttctgactgtcaaactgttcttgtcaatctcacaggctcctggttgtctacccatggacccagaggttctttgacagctttggcaacctgtcctctgcctctgccatcatgggcaaccccaaagtcaaggcacatggcaagaaggtgctgacttccttgggagatgccataaagcacctggatgatctcaagggcacctttgcccagctgagtgaactgcactgtgacaagctgcatgtggatcctgagaacttcaaggtgagtccaggagatgtttcagcactgttgcctttagtctcgaggcaacttagacaactgagtattgatctgagcacagcagggtgtgagctgtttgaagatactggggttgggagtgaagaaactgcagaggactaactgggctgagacccagtggcaatgttttagggcctaaggagtgcctctgaaaatctagatggacaactttgactttgagaaaagagaggtggaaatgaggaaaatgacttttctttattagatttcggtagaaagaactttcacctttcccctatttttgttattcgttttaaaacatctatctggaggcaggacaagtatggtcgttaaaaagatgcaggcagaaggcatatattggctcagtcaaagtggggaactttggtggccaaacatacattgctaaggctattcctatatcagctggacacatataaaatgctgctaatgcttcattacaaacttatatcctttaattccagatgggggcaaagtatgtccaggggtgaggaacaattgaaacatttgggctggagtagattttgaaagtcagctctgtgtgtgtgtgtgtgtgtgtgtgtgtcagcgtgtgtttcttttaacgtcttcagcctacaacatacagggttcatggtgggaagaagatagcaagatttaaattatggccagtgactagtgcttgaaggggaacaactacctgcatttaatgggaaggcaaaatctcaggctttgagggaagttaacataggcttgattctgggtggaagctgggtgtgtagttatctggaggccaggctggagctctcagctcactatgggttcatctttattgtctcctttcatctcaacagctcctgggaaatgtgctggtgaccgttttggcaatccatttcggcaaagaattcacccctgaggtgcaggcttcctggcagaagatggtgactgcagtggccagtgccctgtcctccagataccactgagcctcttgcccatgattcagagctttcaaggataggctttattctgcaagcaatacaaataataaatctattctgctgagagatcacacatgattttcttcagctcttttttttacatctttttaaatatatgagccacaaagggtttatattgagggaagtgtgtatgtgtatttctgcatgcctgtttgtgtttgtggtgtgtgcatgctcctcatttatttttatatgagatgtgcattttgatgagcaaataaaagcagtaaagacacttgtacacgggagttctgcaagtgggagtaaatggtgttggagaaatccggtgggaagaaagacctctataggacaggacttctcagaaacagatgttttggaagagatgggaaaaggttcagtgaagacctgggggctggattgattgcagctgagtagcaaggatggttcttaatgaagggaaagtgttccaagctttaggaattcaaggtttagtcaggtgtagcaattctattttattaggaggaatactatttctaatggcacttagcttttcacagcccttgtggatgcctaagaaagtgaaattaatcccatgccctcaagtgtgcagattggtcacagcatttcaagggagagacctcattgtaagactctgggggaggtggggacttaggtgtaagaaatgaatcagcagaggctcacaagtcagcatgagcatgttatgtctgagaaacagaccagcactgtgagatcaaaatgtagtgggaagaatttgtacaacattaattggaaggtttacttaatggaatttttgtatagttggatgttagtgcatctctataagtaagagtttaatatgatggtgttacggacctggtgtttgtgtctcctcaaaattcacatgctgaatccccaactcccaactgaccttatctgtgggggaggcttttgaaaagtaattaggtttagctgagctcataagagcagatccccatcataaaattattttccttatcagaagcagagagacaagccatttctctttcctcccggtgaggacacagtgagaagtccgccatctgcaatccaggaagagaaccctgaccacgagtcagccttcagaaatgtgagaaaaaactctgttgttgaagccacccagtcttttgtattttgttatagcaccttacactgagtaaggcagatgaagaaggagaaaaaaataagcttgggttttgagtgaactacagaccatgttatctcaggtttgcaaagctcccctcgtcccctatgtttcagcataaaatacctactctactactctcatctataagacccaaataataagcctgcgcccttctctctaactttgatttctcctatttttacttcaacatgctttactctagccttgtaatgtctttacatacagtgaaatgtaaagttctttattctttttttctttctttcttttttctcctcagcctcagaatttggcacatgcccttccttctttcaggaacttctccaacatctctgcctggctccatcatatcataaaggtcccacttcaaatgcagtcactaccgtttcaggatatgcactttctttcttttttgttttttgttttttttaagtcaaagcaaatttcttgagagagtaaagaaataaacgaatgactactgcataggcagagcagccccgagggccgctggttgttccttttatggttatttcttgatgatatgttaaacaagttttggattatttatgccttctctttttaggccatatagggtaactttctgacattgccatggcatgtttcttttaatttaatttactgttaccttaaattcaggggtacacgtacaggatatgcaggtttgttttataggtaaaagtgtgccatggttttaatgggttttttttttcttgtaaagttgtttaagtttcttgtttactctggatattggcctttgtcagaagaatagattggaaaatctttttcccattctgtagattgtctttcgctctgatggtagtttcttttgctgagcaggagctctttagtttaattagattccattggtcaatttttgcttttgctgcaattgcttttcacgctttcatcatgaaatctgtgcccgtgtttatatcatgaatagtattgccttgatttttttctaggctttttatagtttggggtttttcatttaagtctctaatccatccggagttaattttggataaggtataaggaaggagtccagtttcatttttcagcatatggctagccagttctcccccatcatttattaaattgaaaatcctttccccattgcttgcttttgtcaggtttctaaaagacagatggttgtaggtacaatatgcagtttcttcaagtcatataataccatctgaaatctcttattaattcatttcttttagtatgtatgctggtctcctctgctcactatagtgagggcaccattagccagagaatctgtctgtctagttcatgtaagattctcagaattaagaaaaatggatggcatatgaatgaaacttcatggatgacatatggaatctaatgtgtatttgttgaattaatgcataagatgcaacaagggaaaggttgacaactgcagtgataacctggtattgatgatataagagtctatagatcacagtagaagcaataatcatggaaaacaattggaaatggggaacagccacaaacaagaaagaatcaatactaccaggaaagtgactgcaggtcacttttcctggagcgggtgagagaaaagtggaagttgcagtaactgccgaattcctggttggctgatggaaagatggggcaactgttcactggtacgcagggttttagatgtatgtacctaaggatatgaggtatggcaatgaacagaaattcttttgggaatgagttttagggccattaaaggacatgacctgaagtttcctctgaggccagtccccacaactcaatataaatgtgtttcctgcatatagtcaaagttgccacttctttttcttcatatcatcgatctctgctcttaaagataatcttggttttgcctcaaactgtttgtcactacaaactttccccatgttcctaagtaaaacaggtaactgcctctcaactatatcaagtagactaaaatattgtgtctctaatatcagaaattcagctttaatatattgggtttaactctttgaaatttagagtctccttgaaatacacatgggggtgatttcctaaactttatttcttgtaaggatttatctcaggggtaacacacaaaccagcatcctgaacctctaagtatgaggacagtaagccttaagaatataaaataaactgttcttctctctgccggtggaagtgtgccctgtctattcctgaaattgcttgtttgagacgcatgagacgtgcagcacatgagacacgtgcagcagcctgtggaatattgtcagtgaagaatgtctttgcctgattagatataaagacaagttaaacacagcattagactatagatcaagcctgtgccagacacaaatgacctaatgcccagcacgggccacggaatctcctatcctcttgcttgaacagagcagcacacttctcccccaacactattagatgttctggcataattttgtagatatgtaggatttgacatggactattgttcaatgattcagaggaaatctcctttgttcagataagtacactgactactaaatggattaaaaaacacagtaataaaacccagttttccccttacttccctagtttgtttcttattctgctttcttccaagttgatgctggatagaggtgtttatttctattctaaaaagtgatgaaattggccgggcgcggtggctcacacctgtaatcccagcactttgggaggctgaggtgggcggatcacgaggtcaggagatcaagaccatcctggctaacatggtgaaaccccatctctactaaaaatacaaaaaattagccagagacggtggcgggtgcctgtagtcccagctactcgggaggctgaggcaggagaatggcgtgaacctgggaggcagagctgcagtgagcagagatcgcgccactgcacactccagcctgggtgacaaagcgagactccatctcaaaaaaaaaaaaaaaaaaaaaaagaaagaaagaaagaaaaaaaaagtgatgaaattgtgtattcaatgtagtctcaagagaattgaaaaccaagaaaggctgtggcttcttccacataaagcctggatgaataacaggataacacgttgttacattgtcacaactcctgatccaggaattgatggctaagatattcgtaattcttatccttttcagttgtaacttattcctatttgtcagcattcaggttattagcggctgctggcgaagtccttgagaaataaactgcacactggatggtgggggtagtgtaggaaaatggaggggaaggaagtaaagtttcaaattaagcctgaacagcaaagttcccctgagaaggccacctggattctatcagaaactcgaatgtccatcttgcaaaacttccttgcccaaaccccacccctggagtcacaacccacccttgaccaatagattcatttcactgagggaggcaaagggctggtcaatagattcatttcactgggagaggcaaagggctgggggccagagaggagaagtaaaaagccacacatgaagcagcaatgcaggcatgcttctggctcatctgtgatcaccaggaaactcccagatctgacactgtagtgcatttcactgctgacaagaaggctgctgccaccagcctgtgaagcaaggttaaggtgagaaggctggaggtgagattctgggcaggtaggtactggaagccgggacaaggtgcagaaaggcagaaagtgtttctgaaagagggattagcccgttgtcttacatagtctgactttgcacctgctctgtgattatgactatcccacagtctcctggttgtctacccatggacctagaggtactttgaaagttttggatatctgggctctgactgtgcaataatgggcaaccccaaagtcaaggcacatggcaagaaggtgctgatctccttcggaaaagctgttatgctcacggatgacctcaaaggcacctttgctacactgagtgacctgcactgtaacaagctgcacgtggaccctgagaacttcctggtgagtagtaagtacactcacgctttcttctttacccttagatatttgcactatgggtacttttgaaagcagaggtggctttctcttgtgttatgagtcagctatgggatatgatatttcagcagtgggattttgagagttatgttgctgtaaataacataactaaaatttggtagagcaaggactatgaataatggaaggccacttaccatttgatagctctgaaaaacacatcttataaaaaattctggccaaaatcaaactgagtgttttggatgagggaacagaagttgagatagagaaaataacatctttcctttggtcagcgaaattttctataaaaattaatagtcacttttctgcatagtcctggaggttagaaaaagatcaactgaacaaagtagtgggaagctgttaaaagaggattgtttccctccgaatgatgatggtatacttttgtacgcatggtacaggattctttgttatgagtgtttgggaaaattgtatgtatgtatgtatgtatgtgatgactggggacttatcctatccattactgttccttgaagtactattatcctactttttaaaaggacgaagtctctaaaaaaaaaatgaaacaatcacaatatgttggggtagtgagttggcatagcaagtaagagaaggataggacacaatgggaggtgcagggctgccagtcatattgaagctgatatctagcccataatggtgagagttgctcaaactctggtcaaaaaggatgtaagtgttatatctatttactgcaagtccagcttgaggccttctattcactatgtaccattttcttttttatcttcactccctccccagctcttaggcaacgtgatattgattgttttggcaacccacttcagcgaggattttaccctacagatacaggcttcttggcagtaactaacaaatgctgtggttaatgctgtagcccacaagaccactgagttccctgtccactatgtttgtacctatgtcccaaaatctcatctcctttagatgggggaggttggggagaagagcagtatcctgcctgctgattcagttcctgcatgataaaaatagaataaagaaatatgctctctaagaaatatcattgtactctttttctgtctttatattttaccctgattcagccaaaaggacgcactatttctgatggaaatgagaatgttggagaatgggagtttaaggacagagaagatactttcttgcaatcctgcaagaaaagagagaactcgtgggtggatttagtggggtagttactcctaggaaggggaaatcgtctctagaataagacaatgtttttacagaaagggaggtcaatggaggtactctttggaggtgtaagaggattgttggtagtgtgtagaggtatgttaggactcaaattagaagttctgtataggctattatttgtatgaaactcaggatatagctcatttggtgactgcagttcacttctacttattttaaacaacatattttttatgatttataatgaagtggggatggggcttcctagagaccaatcaagggccaaaccttgaactttctcttaacgtcttcaatggtattaatagagaattatctctaaggcatgtgaactggctgtcttggttttcatctgtacttcatctgctacctctgtgacctgaaacatatttataattccattaagctgtgcatatgatagatttatcatatgtattttccttaaaggatttttgtaagaactaattgaattgatacctgtaaagtctttatcacactacccaataaataataaatctctttgttcagctctctgtttctataaatatgtacaagttttattgtttttagtggtagtgattttattctctttctatatatatacacacacatgtgtgcattcataaatatatacaatttttatgaataaaaaattattagcaatcaatattgaaaaccactgatttttgtttatgtgagcaaacagcagattaaaaggctgagatttaggaaacagcacgttaagtcaagttgatagaggagaatatggacatttaaaagaggcaggatgatataaaattagggaaactggatgcagagaccagatgaagtaagaaaaatagctatcgttttgagcaaaaatcactgaagtttcttgcatatgagagtgacataataaatagggaaacgtagaaaattgattcacatgtatatatatatatagaactgattagacaaagtctaacttgggtatagtcagaggagcttgctgtaattatattgaggtgatggataaagaactgaagttgatggaaacaatgaagttaagaaaaaaaatcgagtaagagaccattgtggcagtgattgcacagaactggaaaacattgtgaaacagagagtcagagatgacagctaaaatccctgtctgtgaatgaaaagaaggaaatttattgacagaacagcaaatgcctacaagccccctgtttggatctggcaatgaacgtagccattctgtggcaatcacttcaaactcctgtacccaagacccttaggaagtatgtagcaccctcaaacctaaaacctcaaagaaagaggttttagaagatataataccctttcttctccagtttcattaatcccaaaacctctttctcaaagtatttcctctatgtgtccaccccaaagagctcacctcaccatatctcttgagtgggagcacatagataggcggtgctaccatctaacagcttctgaaattcctttgtcatatttttgagtccccactaataacccacaaagcagaataaataccagttgctcatgtacaataatcactcaactgctgtcttgtagcatacattaattaagcacattctttgaataattactgtgtccaaacaatcacactttaaaatctcacacttgtgctatcccttgcccttctgaatgtcactctgtattttaaatgaagagatgagggttgaatttcctgtgttacttattgttcatttctcgatgaggagttttcacattcacctttactggaaaacacataagtacacatcttacaggaaaaatataccaaactgacatgtagcatgaatgcttgtgcatgtagtcatataaaatcttgtagcaatgtaaacattctctgatatacacatacagatgtgtctatatgtctacacaatttcttatgctccatgaacaaacattccatgcacacataagaacacacactgttacagatgcatacttgagtgcattgacaaaattaccccagtcaatctagagaatttggatttctgcatttgactctgttagctttgtacatgctgttcatttactctgggtgatgtctttccctcattttgccttgtctatcttgtactcatactttaagtcctaacttatatgttatctcaactaagaagctatttttttttaattttaactgggcttaaagccctgtctataaactctgctacaattatgggctctttcttataatatttagtgtttttcctactaatgtacttaatctgctcattgtatattcctaccactaaattttaacctcttttatggtagagacattgtcttgtaaactcttatttccctagtatttggagatgaaaaaaaagattaaattatccaaaattagatctctcttttctacattatgagtattacactatccatagggaagtttgtttgagacctaaactgaggaacctttggttctaaaatgactatgtgatatcttagtatttataggtcatgaggttccttcctctgcctctgctatagtttgattagtcagcaagcatgtgtcatgcatttattcacatcagaatttcatacactaataagacatagtatcagaagtcagtttattagttatatcagttagggtccatcaaggaaaggacaaaccattatcagttactcaacctagaattaaatacagctcttaatagttaattatccttgtattggaagagctaaaatatcaaataaaggacagtgcagaaatctagatgttagtaacatcagaaaacctcttccgccattaggcctagaagggcagaaggagaaaatgtttataccaccagagtccagaaccagagcccataaccagaggtccactggattcagtgagctagtgggtgctccttggagagagccagaactgtctaatgggggcatcaaagtatcagccataaaaaaccataaaaaagactgtctgctgtaggagatccgttcagagagagagagagaccagaaataatcttgcttatgctttccctcagccagtgtttaccattgcagaatgtacatgcgactgaaagggtgaggaaacctgggaaatgtcagttcctcaaatacagagaacactgagggaaggatgagaaataaatgtgaaagcagacatgaatggtaattgacagaaggaaactaggatgtgtccagtaaatgaataattacagtgtgcagtgattattgcaatgattaatgtattgataagataatatgaaaacacagaattcaaacagcagtgaactgagattagaattgtggagagcactggcatttaagaatgtcacacttagaatgtgtctctaggcattgttctgtgcatatatcatctcaatattcattatctgaaaattatgaattaggtacaaagctcaaataatttattttttcaggttagcaagaactttttttttttttttttctgagatggagcattgctatggttgcccaggctggagtgcaatggcatgatccaggctcactgcaacatctgcctcccaggttcaagcgattctcctgcctcagcctcccaagtagctggcattacaggcatgtgccaccaccatgcctggctaattttctatttttagtagatagggggtttcaccatgttggtcaggctgatctcgaactcctaacatcaggtgatccaccctcctcggcctctgaatgtactgggatcacaggcgtgagccaccacacccagccaagaatgtgaattttgtagaaggatataacccatatttctctgaccctagagtccttagtatacctcccataccatgtggctcatcctccttacatacatttcccatctttcaccctaccttttcctttttgtttcagcttttcactgtgtgtcaaaatctagaaccttatctcctacctgctctgaaaccaacagcaagttgacttccattctaacccacattggcattacactaattaaaatcgatactgagttctaaaatcatctgggattttggggactatgtcttacttcatacttccttgagatttcacattaaatgttggtgttcattaaaggtccttcatttaactttgtattcatcacactcttggattcacagttatatctaaactcttatatatagcctgtataatcccaattcccaagtctgatttctaacctctgacctccaacctcagtgccaaacccatatatcaaacaatgtactgggcttatttatatagatgtcctataggcacctcagactcagcatgggtatttcacttgttatactaaaactgtttctcttccagtgttttccattttagtcattagatagctacttgcccattcaccaaggtcacagattaaaatcatttccctacctctaatcaacagttcaattctgcttcaatttgtccctatctattaatcaccactcttactgcccagtcaggtcctcattgtttcctgaacaagagtagatgctattctttccactttaagaccttatcctggctggatgcggtggctcaggcttgtaaacccagcactttgggaggccgaggcaggcagatcacttgaggtcaggagttcaagaccagcctgaccaacatggtgaaaccccatctctactaaaaatacaaaatcagccgggcgtgtggtgcatgcctgcagtcccagctattcaggtggctgaggcaggagaattgcttgaacccaggaggcggaggttgcggtgagcctagattgcaccattgcactctagcttgggcaatagggatgaaactccatctcagaagagaaaagaaaaaaagaccttattctgttacacaaatcctctcaatgcaatccatatagaataaacatgtaaccagatctcccaatgtgtaaaatcatttcaggtagaacagaattaaagtgaaaagccaagtctttggaattaacagacaaagttcaaataacagtcctcatggccttaagaatttacctaacattttttttagaatcaattttcttatatatgaattggaaacataattcctccctcacaaacacattctaagattttaaggagatattgatgaagtacatcatctgtcatttttaacagttagtggtagtgattcacacagcacattatgatctgttcttgtatgttctgttccattctgtattcttgacctggttgtattctttctgagctccagatccacatatctaagtacatctttttgcattttacaagagtgcatacaatacaatgtatccaagactgtatttctgattttatcgtaccactaaactcacaaatgtggccctattcttgtgttcacgactgacatcaccgtcatggtccaagtctgataatagaaatggcattgtcactttcttccctactgcaacagaagcccagctatttgtctcccattttctctacttctaaaatacatttcttcactaagtgagaataatcttttaaagacacaaatcaaaccatgccaccacctttcttgaattattcaatatctttcgttggcttccaggttacagaaaaataacttgtaacaaagtttaaaggtcattcatggctcctctctaccctattttataacatttccccttgtgatcagaatctcaggcacatcatccatctttctatatacaaataaagtcatatagtttgaactcacctctggttacttttaatcaaccaaatgctgtaaaatgcatttgtatcgctacgtgttaagcagtagttgattcttttcatttcttgttaatattctattctttgactataccgtaatttatcaattctactgttggtaagcatttaagtggctaccggtttgaggtttttatgattattgctgtcataagcatttctatacatgtctttggatacacacatgcatgtgtttctgaatatctaaaaatgtaattgctaggtaatagacttatcaagcatccagcatttgtggatactattaaaggttttccaaaggggttatactattgtacagtgtcaccaacagagtttgagtttctattgatccatatcaccaccaaaatttgaactgtcagtcttatctcttctcttgtctcttttttcctcttttttttccttcccttcccctctcttcgtttcttttctctcctcttctcttctttcctctcttcccttccctttctctttctcttccctatcccttctcctctcctctcccctccttttttctcctctcctctccattatttatttttccttcttctcctccatcccttccatcctctctcttcccctcttccttccttcctttctccatttcttcctcctctttccctcaatccttccttttggatatgctcatgggtgtgtatttgtctgccattgtggcattatttgaattcagaaaagagtgaaaaactactgggatcttcattctgggtctaattccacatttttttttaagaacacactctgtaaaaatgttctgtactagcatattcccaggaacttcgttaaatttaatctggctgaatatggtaaatctactttgcactttgcattctttctttagtcataccataattttaaacattcaaaatatttgtatataatatttgattttatctgtcattaaaatgttaaccttaaaattcatgtttccagaacctatttcaataactggtaaataaacactattcattttttaaatattcttttaatggatatttatttcaatataataaaaaattagagttttattataggaagaatttaccaaaagaaggaggaagcaagcaagtttaaactgcagcaatagttgtccattccaacctctcaaaattcccttggagacaaaatctctagaggcaaagaagaactttatattgagtcaacttgttaaaacatctgcttttagataagttttcttagtataaagtgacagaaacaaataagttaaactctaagatacattccactatattagcctaaaacacttctgcaaaaatgaaactaggaggatatttttagaaacaactgctgaaagagatgcggtggggagatatgcagaggagaacagggtttctgagtcaagacacacatgacagaacagccaatctcagggcaagttaagggaatagtggaatgaaggttcatttttcattctcacaaactaatgaaaccctgcttatcttaaaccaacctgctcactggagcagggaggacaggaccagcataaaaggcagggcagagtcgactgttgcttacactttcttctgacataacagtgttcactagcaacctcaaacagacaccatggtgcatctgactcctgaggagaagactgctgtcaatgccctgtggggcaaagtgaacgtggatgcagttggtggtgaggccctgggcaggttggtatcaaggttataagagaggctcaaggaggcaaatggaaactgggcatgtgtagacagagaagactcttgggtttctgataggcactgactctctgtcccttgggctgttttcctaccctcagattactggtggtctacccttggacccagaggttctttgagtcctttggggatctgtcctctcctgatgctgttatgggcaaccctaaggtgaaggctcatggcaagaaggtgctaggtgcctttagtgatggcctggctcacctggacaacctcaagggcactttttctcagctgagtgagctgcactgtgacaagctgcacgtggatcctgagaacttcagggtgagtccaggagatgcttcacttttctctttttactttctaatcttacattttggttcttttacctacctgctcttctcccacatttttgtcattttactatattttatcatttaatgcttctaaaattttgttaattttttatttaaatattctgcattttttccttcctcacaatcttgctattttaaattatttaatatcctgtctttctctcccaaccccctcccttcatttttccttctctaacaacaactcaaattatgcataccagctctcacctgctaattctgcacttagaataatccttttgtctctccacatgggtatgggagaggctccaactcaaagatgagaggcatagaatactgttttagaggctataaatcattttacaataaggaataattggaattttataaattctgtagtaaatggaatggaaaggaaagtgaatatttgattatgaaagactaggcagttacactggaggtggggcagaagtcgttgctaggagacagcccatcatcacactgattaatcaattaatttgtatctattaatctgtttatagtaattaatttgtatatgctatatacacatacaaaattaaaactaatttggaattaatttgtatatagtattatacagcatatatagcatatatgtacatatatagactacatgctagttaagtacatagaggatgtgtgtgtatagatatatgttatatgtatgcattcatatatgtacttatttatgctgatgggaataacctggggatcagttttgtctaagatttgggcagaaaaaaatgggtgttggctcagtttctcagaagccagtctttatttctctgttaaccatatgcatgtatctgcctacctcttctccgcagctcttgggcaatgtgctggtgtgtgtgctggcccgcaactttggcaaggaattcaccccacaaatgcaggctgcctatcagaaggtggtggctggtgtggctaatgccctggctcacaagtaccattgagatcctggactgtttcctgataaccataagaagaccctatttccctagattctattttctgaacttgggaacacaatgcctacttcaagggtatggcttctgcctaataaagaatgttcagctcaacttcctgattaatttcacttatttcatttttttgtccaggtgtgtaagaaggttcctgaggctctacagatagggagcacttgtttattttacaaagagtacatgggaaaagagaaaagcaagggaaccgtacaaggcattaatgggtgacacttctacctccaaagagcagaaattatcaagaactcttgatacaaagataatactggcactgcagaggttctagggaagacctcaaccctaagacatagcctcaagggtaatagctacgattaaactccaacaattactgagaaaataatgtgctcaattaaaggcataatgattactcaagacaatgttatgttgtctttcttcctccttcctttgcctgcacattgtagcccataatactataccccatcaagtgttcctgctccaagaaatagcttcctcctcttacttgccccagaacatctctgtaaagaatttcctcttatcttcccatatttcagtcaagattcattgctcacgtattacttgtgacctctcttgaccccagccacaataaacttctctatactacccaaaaaatctttccaaaccctccccgacaccatatttttatatttttcttatttatttcatgcacacacacacactccgtgctttataagcaattctgcctattctctaccttcttacaatgcctactgtgcctcatattaaattcatcaatgggcagaaagaaaatatttattcaagaaaacagtgaatgaatgaacgaatgagtaaatgagtaaatgaaggaatgattattccttgctttagaacttctggaattagaggacaatattaataataccatcgcacagtgtttctttgttgttaatgctacaacatacaaagaggaagcatgcagtaaacaaccgaacagttatttcctttctgatcataggagtaatatttttttccttgagcacatttttgccataggtaaaattagaaggatttttagaactttctcagttgtatacatttttaaaaatctgtattatatgcatgttgattaattttaaacttacttgaatacctaaacagaatctgttgtttccttgtgtttgaaagtgctttcacagtaactctgtctgtactgccagaatatactgacaatgtgttatagttaactgttttgatcacaacattttgaattgactggcagcagaagctctttttatatccatgtgttttccttaagtcattatacatagtaggcatgagactctttatactgaataagatatttaggaaccactggtttacatatcagaagcagagctactcagggcattttggggaagatcactttcacattcctgagcatagggaagttctcataagagtaagatattaaaaggagatacttgtgtggtattcgaaagacagtaagagagattgtagaccttatgatcttgatagggaaaacaaactacattcctttctccaaaagtcaaaaaaaaagagcaaatatagcttactataccttctattcctacaccattagaagtagtcagtgagtctaggcaagatgttggccctaaaaatccaaataccagagaattcatgagaacatcacctggatgggacatgtgccgagcaacacaattactatatgctaggcattgctatcttcatattgaagatgaggaggtcaagagatgaaaaaagacttggcaccttgttgttatattaaaattatttgttagagtagagcttttgtaagagtctaggagtgtgggagctaaatgatgatacacatggacacaaagaatagatcaacagacacccaggcctacttgagggttgagggtgggaagagggagacgatgaaaaagaacctattgggtattaagttcatcactgagtgatgaaataatctgtacatcaagacccagtgatatgcaatttacctatataacttgtacatgtacccccaaatttaaaataaagttaaaacaaagtataggaatggaattaattcctcaagatttggctttaattttatttgataatttatcaaatggttgtttttcttttctcactatggcgttgctttataaactatgttcagtatgtctgaatgaaagggtgtgtgtgtgtgtgaaagagagggagagaggaagggaagagaggacgtaataatgtgaatttgagttcatgaaaatttttcaataaaataatttaatgtcaggagaattaagcctaatagtctcctaaatcatccatctcttgagcttcagagcagtcctctgaattaatgcctacatgtttgtaaagggtgttcagactgaagccaagattctacctctaaagagatgcaatctcaaatttatctgaagactgtacctctgctctccataaattgacaccatggcccacttaatgaggttaaaaaaaagctaattctgaatgaaaatctgagcccagtggaggaaatattaatgaacaaggtgcagactgaaatataaattttctgtaataattatgcatatactttagcaaagttctgtctatgttgactttattgcttttggtaagaaatacaactttttaaagtgaactaaactatcctatttccaaactattttgtgtgtgtgcggtttgtttctatgggttctggttttcttggagcatttttatttcattttaattaattaattctgagagctgctgagttgtgtttactgagagattgtgtatctgcgagagaagtctgtagcaagtagctagactgtgcttgacctaggaacatatacagtagattgctaaaatgtctcacttggggaattttagactaaacagtagagcatgtataaaaatactctagtcaagtgctgcttttgaaacaaatgataaaaccacactcccatagatgagtgtcatgattttcatggaggaagttaatattcatcctctaagtatacccagactagggccattctgatataaaacattaggacttaagaaagattaatagactggagtaaaggaaatggacctctgtctctctcgctgtctcttttttgaggacttgtgtgtgtgtgtgtgtgtgtgtgtgtgtgtgttgtggtcagtggggctggaataaaagtagaatagacctgcacctgctgtggcatccattcacagagtagaagcaagctcacaatagtgaagatgtcagtaagcttgaatagtttttcaggaactttgaatgctgatttagatttgaaactgaggctctgaccataaccaaatttgcactatttattgcttcttgaaacttatttgcctggtatgcctgggcttttgatggtcttagtatagcttgcagccttgtccctgcagggtattatgggtaatagaaagaaaagtctgcgttacactctagtcacactaagtaactaccattggaaaagcaacccctgccttgaagccaggatgatggtatctgcagcagttgccaacacaagagaaggatccatagttcatcatttaaaaaagaaaacaaaatagaaaaaggaaaactatttctgagcataagaagttgtagggtaagtctttaagaaggtgacaatttctgccaatcaggatttcaaagctcttgctttgacaattttggtctttcagaatactataaatataacctatattataatttcataaagtctgtgcattttctttgacccaggatatttgcaaaagacatattcaaacttccgcagaacactttatttcacatatacatgcctcttatatcagggatgtgaaacagggtcttgaaaactgtctaaatctaaaacaatgctaatgcaggtttaaatttaataaaataaaatccaaaatctaacagccaagtcaaatctgtatgttttaacatttaaaatattttaaagacgtcttttcccaggattcaacatgtgaaatcttttctcagggatacacgtgtgcctagatcctcattgctttagttttttacagaggaatgaatataaaaagaaaatacttaaattttatccctcttacctctataatcatacataggcataattttttaacctaggctccagatagccatagaagaaccaaacactttctgcgtgtgtgagaataatcagagtgagattttttcacaagtacctgatgagggttgagacaggtagaaaaagtgagagatctctatttatttagcaataatagagaaagcatttaagagaataaagcaatggaaataagaaatttgtaaatttccttctgataactagaaatagaggatccagtttcttttggttaacctaaattttatttcattttattgttttattttattttattttattttattttgtgtaatcgtagtttcagagtgttagagctgaaaggaagaagtaggagaaacatgcaaagtaaaagtataacactttccttactaaaccgactgggtttccaggtaggggcaggattcaggatgactgacagggcccttagggaacactgagaccctacgctgacctcataaatgcttgctacctttgctgttttaattacatcttttaatagcaggaagcagaactctgcacttcaaaagtttttcctcacctgaggagttaatttagtacaaggggaaaaagtacagggggatgggagaaaggcgatcacgttgggaagctatagagaaagaagagtaaattttagtaaaggaggtttaaacaaacaaaatataaagagaaataggaacttgaatcaaggaaatgattttaaaacgcagtattcttagtggactagaggaaaaaaataatctgagccaagtagaagaccttttcccctcctacccctactttctaagtcacagaggctttttgttcccccagacactcttgcagattagtccaggcagaaacagttagatgtccccagttaacctcctatttgacaccactgattaccccattgatagtcacactttgggttgtaagtgactttttatttatttgtatttttgactgcattaagaggtctctagttttttatctcttgtttcccaaaacctaataagtaactaatgcacagagcacattgatttgtatttattctatttttagacataatttattagcatgcatgagcaaattaagaaaaacaacaacaaatgaatgcatatatatgtatatgtatgtgtgtatatatacacatatatatatatattttttttcttttcttaccagaaggttttaatccaaataaggagaagatatgcttagaactgaggtagagttttcatccattctgtcctgtaagtattttgcatattctggagacgcaggaagagatccatctacatatcccaaagctgaattatggtagacaaagctcttccacttttagtgcatcaatttcttatttgtgtaataagaaaattgggaaaacgatcttcaatatgcttaccaagctgtgattccaaatattacgtaaatacacttgcaaaggaggatgtttttagtagcaatttgtactgatggtatggggccaagagatatatcttagagggagggctgagggtttgaagtccaactcctaagccagtgccagaagagccaaggacaggtacggctgtcatcacttagacctcaccctgtggagccacaccctagggttggccaatctactcccaggagcagggagggcaggagccagggctgggcataaaagtcagggcagagccatctattgcttacatttgcttctgacacaactgtgttcactagcaacctcaaacagacaccatggtgcacctgactcctgaggagaagtctgccgttactgccctgtggggcaaggtgaacgtggatgaagttggtggtgaggccctgggcaggttggtatcaaggttacaagacaggtttaaggagaccaatagaaactgggcatgtggagacagagaagactcttgggtttctgataggcactgactctctctgcctattggtctattttcccacccttaggctgctggtggtctacccttggacccagaggttctttgagtcctttggggatctgtccactcctgatgctgttatgggcaaccctaaggtgaaggctcatggcaagaaagtgctcggtgcctttagtgatggcctggctcacctggacaacctcaagggcacctttgccacactgagtgagctgcactgtgacaagctgcacgtggatcctgagaacttcagggtgagtctatgggacccttgatgttttctttccccttcttttctatggttaagttcatgtcataggaaggggagaagtaacagggtacagtttagaatgggaaacagacgaatgattgcatcagtgtggaagtctcaggatcgttttagtttcttttatttgctgttcataacaattgttttcttttgtttaattcttgctttctttttttttcttctccgcaatttttactattatacttaatgccttaacattgtgtataacaaaaggaaatatctctgagatacattaagtaacttaaaaaaaaactttacacagtctgcctagtacattactatttggaatatatgtgtgcttatttgcatattcataatctccctactttattttcttttatttttaattgatacataatcattatacatatttatgggttaaagtgtaatgttttaatatgtgtacacatattgaccaaatcagggtaattttgcatttgtaattttaaaaaatgctttcttcttttaatatacttttttgtttatcttatttctaatactttccctaatctctttctttcagggcaataatgatacaatgtatcatgcctctttgcaccattctaaagaataacagtgataatttctgggttaaggcaatagcaatatttctgcatataaatatttctgcatataaattgtaactgatgtaagaggtttcatattgctaatagcagctacaatccagctaccattctgcttttattttatggttgggataaggctggattattctgagtccaagctaggcccttttgctaatcatgttcatacctcttatcttcctcccacagctcctgggcaacgtgctggtctgtgtgctggcccatcactttggcaaagaattcaccccaccagtgcaggctgcctatcagaaagtggtggctggtgtggctaatgccctggcccacaagtatcactaagctcgctttcttgctgtccaatttctattaaaggttcctttgttccctaagtccaactactaaactgggggatattatgaagggccttgagcatctggattctgcctaataaaaaacatttattttcattgcaatgatgtatttaaattatttctgaatattttactaaaaagggaatgtgggaggtcagtgcatttaaaacataaagaaatgaagagctagttcaaaccttgggaaaatacactatatcttaaactccatgaaagaaggtgaggctgcaaacagctaatgcacattggcaacagccctgatgcctatgccttattcatccctcagaaaaggattcaagtagaggcttgatttggaggttaaagttttgctatgctgtattttacattacttattgttttagctgtcctcatgaatgtcttttcactacccatttgcttatcctgcatctctcagccttgactccactcagttctcttgcttagagataccacctttcccctgaagtgttccttccatgttttacggcgagatggtttctcctcgcctggccactcagccttagttgtctctgttgtcttatagaggtctacttgaagaaggaaaaacagggggcatggtttgactgtcctgtgagcccttcttccctgcctcccccactcacagtgacccggaatctgcagtgctagtctcccggaactatcactctttcacagtctgctttggaaggactgggcttagtatgaaaagttaggactgagaagaatttgaaagggggctttttgtagcttgatattcactactgtcttattaccctatcataggcccaccccaaatggaagtcccattcttcctcaggatgtttaagattagcattcaggaagagatcagaggtctgctggctcccttatcatgtcccttatggtgcttctggctctgcagttattagcatagtgttaccatcaaccaccttaacttcatttttcttattcaatacctaggtaggtagatgctagattctggaaataaaatatgagtctcaagtggtccttgtcctctctcccagtcaaattctgaatctagttggcaagattctgaaatcaaggcatataatcagtaataagtgatgatagaagggtatatagaagaattttattatatgagagggtgaaacctaaaatgaaatgaaatcagacccttgtcttacaccataaacaaaaataaatttgaatgggttaaagaattaaactaagacctaaaaccataaaaatttttaaagaaatcaaaagaagaaaattctaatattcatgttgcagccgttttttgaatttgatatgagaagcaaaggcaacaaaaggaaaaataaagaagtgaggctacatcaaactaaaaaatttccacacaaaaaagaaaacaatgaacaaatgaaaggtgaaccatgaaatggcatatttgcaaaccaaatatttcttaaatattttggttaatatccaaaatatataagaaacacagatgattcaataacaaacaaaaaattaaaaataggaaaataaaaaaattaaaaagaagaaaatcctgccatttatgcgagaattgatgaacctggaggatgtaaaactaagaaaaataagcctgacacaaaaagacaaatactacacaaccttgctcatatgtgaaacataaaaaagtcactctcatggaaacagacagtagaggtatggtttccaggggttgggggtgggagaatcaggaaactattactcaaagggtataaaatttcagttatgtgggatgaataaattctagatatctaatgtacagcatcgtgactgtagttaattgtactgtaagtatatttaaaatttgcaaagagagtagatttttttgtttttttagatggagttttgctcttgttgtccaggctggagtgcaatggcaagatcttggctcactgcaacctccgcctcctgggttcaagcaaatctcctgcctcagcctcccgagtagctgggattacaggcatgcgacaccatgcccagctaattttgtatttttagtagagacggggtttctccatgttggtcaggctgatccgcctcctcggccaccaaagggctgggattacaggcgtgaccaccgggcctggccgagagtagatcttaaaagcatttaccacaagaaaaaggtaactatgtgagataatgggtatgttaattagcttgattgtggtaatcatttcacaaggtatacatatattaaaacatcatgttgtacaccttaaatatatacaatttttatttgtgaatgatacctcaataaagttgaagaataataaaaaagaatagacatcacatgaattaaaaaactaaaaaataaaaaaatgcatcttgatgattagaattgcattcttgatttttcagatacaaatatccatttgactgtttactcttttccaaaacaatacaataaattttagcactttatcttcattttccccttcccaatctataattttatatatatatattttagatattttgtatagttttactccctagattttctagtgttattattaaatagtgaagaaatgtttacacttatgtacaaaatgttttgcatgcttttcttcatttctaacattctctctaagtttattctattttttcctgattatccttaatattatctctttctgctggaaatatattgttacttttggtttatctaaaaatggcttcattttcttcattctaaaatcatgttaaattaataccactcatgtgtaagtaagatagtggaataaatagaaatccaaaaactaaatctcacaaaatataataatgtgatatataaaaatatagcttttaaatttagcttggaaataaaaaacaaacagtaattgaacaactatactttttgaaaagagtaaagtgaaatgcttaactgcatataccacaatcgattacacaattaggtgtgaaggtaaaattcagtcacgaaaaaactagaataaaaatatgggaagacatgtatataatcttagagataacagtgttatttaattatcaacccaaagtagaaactatcaagggagaaataaattcagtcaacaataaaagcatttaagaagttattctaggctgggagcggtggctcacacctgcaattgcagcactttgggaggcctagacaggcggatcacgacgtcaggagttcaagatcagcctggccaacatagtgaaacctcatcgctactaaaaatataaaaacttagcctggcgtggtggcaggcatgtgtaatcccagcaatttgggaggctgaggcaggagaatcgcttgatcctgggaggcagaggttgcagtgagccaagattgtgccactgcattccagcccaggtgacagcatgagactccgtcacaaaaaaaaaagaaaaaaaaggggggggggggcggtggagccaagatgaccgaataggaacagctccagtctatagctcccatcgtgagtgacgcagaagacgggtgatttctgcatttccaactgaggtaccaggttcatctcacagggaagtgccaggcagtgggtgcaggacagtagtgcagtgcactgtgcatgagccgaagcagggcgaggcatcacctcacccgggaagcacaaggggtcagggaattccctttcctagtcaaagaaaagggtgacagatggcacctggaaaatcgggtcactcccgccctaatactgcgctcttccaacaagcttaacaaatggcacaccaggagattatatcccatgcctggctcagagggtcctacgcccatggagcctcgctcattgctagcacagcagtctgaggtcaaactgcaaggtggcagtgaggctgggggaggggtgcccaccattgtccaggcttgagcaggtaaacaaagccgcctggaagctcgaactgggtggagcccaccacagctcaaggaggcctgcctgcctctgtaggctccacctctaggggcagggcacagacaaacaaaagacaacaagaacctctgcagacttaaatgtccctgtctgacagctttgaagagagtagtggttctcccagcacatagcttcagatctgagaacaggcagactgcctcctcaagtgggtccctgacccccgagtagcctaactgggaggcatcccccagtagggcggactgacacctcacatggctggtactcctctaagacaaaacttccagaggaatgatcaggcagcagcatttgcggttcaccaatatccactgttctgcagccaccgctgctgatacccaggaaaacagcatctggagtggacctccagtaaactccaacagacctgcagctgagggtcctgactgttagaaggaaaactaacaaacagaaaggacatccacaccaaaaacccatctgtacatcaccatcatcaaagaccaaaggtagataaaaccataaagatggggaaaaagcagagcagaaaaactggacactctaaaaatgagagtgcctctccttctccaaagtaacgcagctcctcaccagcaatggaacaaagctgggcagagaatgactttgacgagttgagagaggaaggcttcagaagatcaaactactccaagctaaaggaggaagttcgaacaaacggcaaagaagtaaaaaactttgaaaaaaaattagatgaatggataactagaataaccaatgcacagaagtccttaaaggacctgatggagctgaaaaccaaggcaggagaactacgtgacaaatacacaagcctcagtaaccgatgagatcaactggaagaaagggtatcaatgacggaagatgaaatgaatgaaatgaagcatgaagagaagtttagagaaaaaagaataaaaagaaacgaacaaagcctccaagaaatatgggactatgtgaaaagaccaaatctacatctaattggtgtagctgaaagtgatggggagaatggaaccaagttggaaaacactctgcaggatattatccaggagaacttccccaatctagcaaggcagcccaaattcacattcaggaaatacagagaacgccacaaagatactcctagagaaaagcaactccaagacacataactgacagattcaccaaagttgaaatgaaggaaaaaatgttaagggcagccagagagaaaggtcgggttacccacaaagggaagcccatcagactaacagctgatctatcggcagaaactctacaagccagaagaaagtgggggccaatattcaacattgttaaagaaaagaattttcggcccagaatttcatatccagccaaactaagcttcataagcattggagaaataaaatcctttacagacaagcaaatgctgagagattttgtcaccaccaggcctgccctacaagagctcctgaaggaagcactaaacatggaaaggaacaactagtatcagccactgcaaaaacatgccaaattgtaaacgaccatcaaggctaggaagaaactgcatcaaggagcaaaataaccagctaacatcataatgacaggatcaaattcatacataacaatactcaccttaaatgtaaataggctaaatgctccaattaaaagacacagactggcaaattggataaggagtcaagacccatctgtcgttatgtattcaggaaacccatctcacgtgcagagacacacataggctcgaaataaaaggatggaggaatatctaccaagcaaatggaaaacaaaaaaaggcaggggttgcaatcctagtctctgataaaacagattttaaaccaacaaagatcaaaagagacaaagaaggccattacataatggcaaagggatctattcaagaagaagaactaactatactaaatatatatgcacccaatacaggagcacccagattcataaaacaagtcctgagtgacctacaaagagacttagatgcccacacaataataatgggagactttaacaccccactgtcaacattagacagatcaacgagacagaaagttaacaaggatatccaggaattggactcagctctgcaccaagcagacctaatagacatctacagaactctccaccccaaatcaacagaatatacattcttttcagcaccacaccacacctattccaaaactgaccacatagttggaagtaaagctctcctcagcaaatgtaaaagaacagaaactataacaaactgtctctcagaccacagtgcaatcaaactagaactcaggattaagaaactcactcaaaaccactcagctacatggaaactgaacagcctgctcctgaatgactactgggtacataacaaaatgaaggcagaaataaagatgttctttgaaacaacgagaacaaagacacaacacaccagaatctctgagacacattcaaagcagtgtgtagagggaaatttatagcactaaatgcccacaagggaaagcaggaaagatctaaaattgacaccctaacatcacaattaaaaaactagagaagcaggagcaaacacattcaaaagctaacagaagacaagaaataactaagatcagagcagaagtgaagaagatagagacacaaaaaacccttcaaaaaaatcaatgaatccagaagctgtttttttgaaaagatcaacaaaattgatagactgctagcaagactaataaagaagaaaggggagaagaatcaaatagacgcaataaaaaatgacacggggtatcaccactgatcccacagaaatacaaactaccgtcagagaatactataaacacctctacgcaaataaactagaaaatctagaagaaatggataaattcctcgacacatacactctgccaagactaaaccaggaagaagttgtatctctgaatagaccaataacaggctctgaaattgaggcaataattaatagcttatcaaccaaaaaaagtccgggaccagtaggattcatagccgaattctaccagaggtacaaggaggagctggtaccattccttctgaaactattccaatcaatagaaaaagagggaatcctccctaactcattttatgaggccagcatcatcctgataccaaagcctgacagagacacaacaaaaaaagagaatgttacaccaatatccttgatgaacatcgatgcaaaaatcctcaataaaatactggcaaactgaatccagcagcacatcaaaaagcttatcctccatgatcaagtgggcttcatccctgccatgcaaggctggttcaacatacgaaatcaataaacataatccagcatataaacagaaccaaagacacaaaccatatgattatctcaatagatgcagaaaaggcctttgacaaaattcaacaatgcttcatgctaaaaactctcaataaattaggtattgatgggacatatctcaaaataataagagctatctatgacaaacccacagccaatatcatactgagtggacaaaaactggaagcattccctttgaaaactggcacaaggcagggatgccctctctcaccactcctattcaacatagtgttggaagttctggccagggcaatcaggcaggagaaggaaataaagggcattcaattaggaaaagaggaaggtgaaattgtccctgtttgcagatgacatgattgtatatctagaaaaccccattgtctcagcccaaaatctccttaagctgataagcaacttcagcaaagtctcaggatataaaatcagtgtgcaaaaatcacaagtattcctatgcaccaataacagacaaacagagagccaaatcatgagtgaactcccattcacaattgcttcaaagagaataaaatacctaggaatccaacttacaagggatgtgaaggacctcttcaaggagaactacaaaccactgctcaatgaaataaaagaggatacaaacaaatggaagaacattccatgcttatgggtaggaagaatcatatcgtgaaaatggtcatactgcccaaggtaatttatagattcaatgccatccccatcaagctaccaatgactttcttcacagaactggaaaaaactactttaaagttcatatggaatcaaaaaagagcccacatcaccaaggcaatcctaagccaaaagaacaaagctggaggcatcacgctacctgacttcaaactatactacaatgctacggtaaccaaaacagcatggtactggtaccaaaacagagatctagaccaatggaacagaacagagccctcagaaataatgccgcatatctacaactatccgatctttgacaaacctgagagaaacaagcaatggggaaaggattccctatttaataaatggtgctgggaaaactggctagccatatgtagaaagctgaaactggatccttccttacaccttatacaaaaattaattcaagatggattaaagacttaaacattagacctaaaaccataaaaaccctagaaaaaaacctaggcaataccattcaggacataggcatgggcaaggacttcatgtctaaaacaccaaaacgaatggcaacaaaagacaaaatggacaaacgggatctaattaaactaaagagcttctgcacagctaaagaaactaccatcagagtgaacaggcaacctacaaaatgggagaaaatttttgcaatctactcatctgacaaagggctaatatccagaatctacaatgaactcaaacaaatttacaagaaaaaacaaacaaccccatcaaaaagtgggcaaaggatatgaacagacacttctcaaaagaagacatttatgtaatcaaaaaacacatgaaaaaatgctcatcatcactagccatcagagaaatgcaaatcaaaaccacaatgagataccatctcacaccagttagaatggcgatcattaaaaagtcaggaaacaacaggtgctggagaggatgtggagaaacaggaacaacttttacactgttggtgggactgtaaactagttcaaccattgcggaagtcagtgtggcaattcctcaggaatctagaactagaaataccatttgacccagccatcccattactgggtagatacccaaaggattataaatcatgctgctataaagacacatgcacacgtatgtttattgcagcactattcacaatagcaaagacttggaaccaacccaaatgtccaacaacgatagattggattaagaaaatgtggcacatatacaccatggaatactatgcagccataaaaaatgatgagttcatgtcctttgtagggacatggatgaagctggaaactatcattctcagcaaactatcacaaggacaataaaccaaacaccgcatgttctcactcataggtgggaattgaacaatgagaacacatggacacatgaagaggaacatcacactctggggactgttatggggtggggggcaggggcagggatagcactaggagatatacctaatgctaaatgacgagttaatgggtgcagcacaccaacatggcacatgtatacatatataacaaacctgccgttgtgcacatgtaccctaaaacttgaagtataataataaaaaaaagttatcctattaaaactgatctcacacatccgtagagccattatcaagtctttctctttgaaacagacagaaatttagtgttttctcagtcagttaac

SEQ ID NO: 93 - DNA, 73308 bp, Homo sapiens
  misc_feature 1..73308: note = Homo sapiens, GenBank Accession No. U01317.1
  source 1..73308: mol_type = genomic DNA
gaattctaatctccctctcaaccctacagtcacccatttggtatattaaagatgtgttgtctactgtctagtatccctcaagtagtgtcaggaattagtcatttaaatagtctgcaagccaggagtggtggctcatgtctgtaattccagcactggagaggtagaagtgggaggactgcttgagctcaagagtttgatattatcctggacaacatagcaagacctcgtctctacttaaaaaaaaaaaaattagccaggcatgtgatgtacacctgtagtcccagctactcaggaggccgaaatgggaggatcccttgagctcaggaggtcaaggctgcagtgagacatgatcttgccactgcactccagcctggacagcagagtgaaaccttgcctcacgaaacagaatacaaaaacaaacaaacaaaaaactgctccgcaatgcgcttccttgatgctctaccacataggtctgggtactttgtacacattatctcattgctgttcgtaattgttagattaattttgtaatattgatattattcctagaaagctgaggcctcaagatgataacttttattttctggacttgtaatagctttctcttgtattcaccatgttgtaactttcttagagtagtaacaatataaagttattgtgagtttttgcaaacacagcaaacacaacgacccatatagacattgatgtgaaattgtctattgtcaatttatgggaaaacaagtatgtactttttctactaagccattgaaacaggaataacagaacaagattgaaagaatacattttccgaaattacttgagtattatacaaagacaagcacgtggacctgggaggagggttattgtccatgactggtgtgtggagacaaatgcaggtttataatagatgggatggcatctagcgcaatgactttgccatcacttttagagagctcttggggaccccagtacacaagaggggacgcagggtatatgtagacatctcattctttttcttagtgtgagaataagaatagccatgacctgagtttatagacaatgagcccttttctctctcccactcagcagctatgagatggcttgccctgcctctctactaggctgactcactccaaggcccagcaatgggcagggctctgtcagggctttgatagcactatctgcagagccagggccgagaaggggtggactccagagactctccctcccattcccgagcagggtttgcttatttatgcatttaaatgatatatttattttaaaagaaataacaggagactgcccagccctggctgtgacatggaaactatgtagaatattttgggttccatttttttttccttctttcagttagaggaaaaggggctcactgcacatacactagacagaaagtcaggagctttgaatccaagcctgatcatttccatgtcatactgagaaagtccccacccttctctgagcctcagtttctctttttataagtaggagtctggagtaaatgatttccaatggctctcatttcaatacaaaatttccgtttattaaatgcatgagcttctgttactccaagactgagaaggaaattgaacctgagactcattgactggcaagatgtccccagaggctctcattcagcaataaaattctcaccttcacccaggcccactgagtgtcagatttgcatgcactagttcacgtgtgtaaaaaggaggatgcttctttcctttgtattctcacatacctttaggaaagaacttagcacccttcccacacagccatcccaataactcatttcagtgactcaacccttgactttataaaagtcttgggcagtatagagcagagattaagagtacagatgctggagccagaccacctgagtgattagtgactcagtttctcttagtaattgtatgactcagtttcttcatctgtaaaatggagggttttttaattagtttgtttttgagaaagggtctcactctgtcacccaaatgggagtgtagtggcaaaatctcggctcactgcaacttgcacttcccaggctcaagcggtcctcccacctcaacatcctgagtagctggaaccacaggtacacaccaccatacctcgctaattttttgtatttttggtagagatggggtttcacatgttacacaggatggtctcagactccggagctcaagcaatctgcccacctcagccttccaaagtgctgggattataagcatgattacaggagttttaacaggctcataagattgttctgcagcccgagtgagttaatacatgcaaagagtttaaagcagtgacttataaatgctaactactctagaaatgtttgctagtattttttgtttaactgcaatcattcttgctgcaggtgaaaactagtgttctgtactttatgcccattcatctttaactgtaataataaaaataactgacatttattgaaggctatcagagactgtaattagtgctttgcataattaatcatatttaatactcttggattctttcaggtagatactattattatccccattttactacagttaaaaaaactacctctcaacttgctcaagcatacactctcacacacacaaacataaactactagcaaatagtagaattgagatttggtcctaattatgtctttgctcactatccaataaatatttattgacatgtacttcttggcagtctgtatgctggatgctggggatacaaagatgtttaaatttaagctccagtctctgcttccaaaggcctcccaggccaagttatccattcagaaagcattttttactctttgcattccactgtttttcctaagtgactaaaaaattacactttattcgtctgtgtcctgctctgggatgatagtctgactttcctaacctgagcctaacatccctgacatcaggaaagactacaccatgtggagaaggggtggtggttttgattgctgctgtcttcagttagatggttaactttgtgaagttgaaaactgtggctctctggttgactgttagagttctggcacttgtcactatgcctattatttaacaaatgcatgaatgcttcagaatatgggaatattatcttctggaatagggaatcaagttatattatgtaacccaggattagaagattcttctgtgtgtaagaatttcataaacattaagctgtctagcaaaagcaagggcttggaaaatctgtgagctcctcaccatatagaaagcttttaacccatcattgaataaatccctataggggatttctaccctgagcaaaaggctggtcttgattaattcccaaactcatatagctctgagaaagtctatgctgttaacgttttcttgtctgctaccccatcatatgcacaacaataaatgcaggcctaggcatgactgaaggctctctcataattcttggttgcatgaatcagattatcaacagaaatgttgagacaaactatggggaagcagggtatgaaagagctctgaatgaaatggaaaccgcaatgcttcctgcccattcagggctccagcatgtagaaatctggggctttgtgaagactggcttaaaatcagaagccccattggataagagtagggaagaacctagagcctacgctgagcaggtttccttcatgtgacagggagcctcctgccccgaacttccagggatcctctcttaagtgtttcctgctggaatctcctcacttctatctggaaatggtttctccacagtccagcccctggctagttgaaagagttacccatgcagaggccctcctagcatccagagactagtgcttagattcctactttcagcgttggacaacctggatccacttgcccagtgttcttccttagttcctaccttcgaccttgatcctcctttatcttcctgaaccctgctgagatgatctatgtggggagaatggcttctttgagaaacatcttcttcgttagtggcctgcccctcattcccactttaatatccagaatcactataagaagaatataataagaggaataactcttattataggtaagggaaaattaagaggcatacgtgatgggatgagtaagagaggagagggaaggattaatggatgataaaatctactactatttgttgagaccttttatagtctaatcaattttgctattgttttccatcctcacgctaactccataaaaaaacactattattatctttattttgccatgacaagactgagctcagaagagtcaagcatttgcctaaggtcggacatgtcagaggcagtgccagacctatgtgagactctgcagctactgctcatgggccctgtgctgcactgatgaggaggatcagatggatggggcaatgaagcaaaggaatcattctgtggataaaggagacagccatgaagaagtctatgactgtaaatttgggagcaggagtctctaaggacttggatttcaaggaattttgactcagcaaacacaagaccctcacggtgactttgcgagctggtgtgccagatgtgtctatcagaggttccagggagggtggggtggggtcagggctggccaccagctatcagggcccagatgggttataggctggcaggctcagataggtggttaggtcaggttggtggtgctgggtggagtccatgactcccaggagccaggagagatagaccatgagtagagggcagacatgggaaaggtgggggaggcacagcatagcagcatttttcattctactactacatgggactgctcccctatacccccagctaggggcaagtgccttgactcctatgttttcaggatcatcatctataaagtaagagtaataattgtgtctatctcatagggttattatgaggatcaaaggagatgcacactctctggaccagtggcctaacagttcaggacagagctatgggcttcctatgtatgggtcagtggtctcaatgtagcaggcaagttccagaagatagcatcaaccactgttagagatatactgccagtctcagagcctgatgttaatttagcaatgggctgggaccctcctccagtagaaccttctaaccagctgctgcagtcaaagtcgaatgcagctggttagactttttttaatgaaagcttagctttcattaaagattaagctcctaagcagggcacagatgaaattgtctaacagcaactttgccatctaaaaaaatctgacttcactggaaacatggaagcccaaggttctgaacatgagaaatttttaggaatctgcacaggagttgagagggaaacaagatggtgaagggactagaaaccacatgagagacacgaggaaatagtgtagatttaggctggaggtaaatgaaagagaagtgggaattaatacttactgaaatctttctatatgtcaggtgccattttatgatatttaataatctcattacatatggtaattctgtgagatatgtattattgaacatactataattaatactaatgataagtaacacctcttgagtacttagtatatgctagaatcaaatttaagtttatcatatgaggccgggcacggtggctcatatatgggattacatgcctgtaatcccagcactttgggaggccaaggcaattggatcacctgaggtcaggagttccagaccagcctggccaacatggtgaaaccccttctctactaaaaaatacaaaaaatcagccaggtgtggtggcacgcgtctataatcccagctactcaggaggctgaggcaggagaatcacttgaacccaggaggtggaggttgcagtgagctaagattgcaccactgcactccagcctaggcgacagagtgagactccatctcaaaaaaaaaaaaagaagtttattatatgaattaacttagttttactcacaccaatactcagaagtagattattacctcatttattgatgaggagcccaatgtacttgtagtgtagatcaacttattgaaagcacaagctaataagtagacaattagtaattagaagtcagatggtctgagctctcctactgtctacattacatgagctcttattaactggggactcgaaaatcaaagacatgaaataatttgtccaagcttacagaaccaccaagtagtaaggctaggatgtagacccagttctgctacctctgaagacagtgttttttccacagcaaaacacaaactcagatattgtggatgcgagaaattagaagtagatattcctgccctgtggcccttgcttcttacttttacttcttggcgattggaagttgtggtccaagccacagttgcagaccatacttcctcaaccataattgcatttcttcaggaaagtttgagggagaaaaaggtaaagaaaaatttagaaacaacttcagaataaagagattttctcttgggttacagagattgtcatatgacaaattataagcagacacttgagaaaactgaaggcccatgcctgcccaaattaccctttgaccccttggtcaagctgcaactttggttaaagggagtgtttatgtgttatagtgttcatttactcttctggtctaacccattggctccgtcttcatcctgcagtgacctcagtgcctcagaaacatacatatgtttgtctagtttaagtttgtgtgaaattctaactagcgtcaagaactgagggccctaaactatgctaggaatagtgctgtggtgctgtgataggtacacaagaaatgagaagaaactgcagattctctgcatctccctttgccgggtctgacaacaaagtttccccaaattttaccaatgcaagccatttctccatatgctaactactttaaaatcatttggggcttcacattgtctttctcatctgtaaaaagaatggaagaactcattcctacagaactccctatgtcttccctgatgggctagagttcctctttctcaaaaattagccattattgtatttccttctaagccaaagctcagaggtcttgtattgcccagtgacatgcacactggtcaaaagtaggctaagtagaagggtactttcacaggaacagagagcaaaagaggtgggtgaatgagagggtaagtgagaaaagacaaatgagaagttacaacatgatggcttgttgtctaaatatctcctagggaattattgtgagaggtctgaatagtgttgtaaaataagctgaatctgctgcctaacattaacagtcaagaaatacctccgaataactgtacctccaattattctttaaggtagcatgcaactgtaatagttgcatgtatatatttatcataatactgtaacagaaaacacttactgaatatatactgtgtccctagttctttacacaataaactaatctcatcctcataattctattagctaatacatattatcatcctatatttcagagacttcaagaagttaagcaacttgctcaagatcatctaagaagtaggtggtatttctgggctcatttggcccctcctaatctctcatggcaacatggctgcctaaagtgttgattgccttaattcatcagggatgggctcatactcactgcagaccttaactggcatcctcttttcttatgtgatctgcctgaccctagtagaacttatgaaatttctgatgagaaaggagagaggagaaaggcagagctgactgtgatgagtgatgaaggtgccttctcatctgggtaccagtggggcctctaagactaagtcactctgtctcactgtgtcttagccagttccttacagcttgccctgatgggagatagagaatgggtatcctccaacaaaaaaataaattttcatttctcaaggtccaacttatgttttcttaatttttaaaaaaatcttgaccattctccactctctaaaataatccacagtgagagaaacattcttttcccccatcccataaatacctctattaaatatggaaaatctgggcatggtgtctcacacctgtaatcccagcactttgggaggctgaggtgggtggactgcttggagctcaggagttcaagaccatcttggacaacatggtgataccctgcctctacaaaaagtacaaaaattagcctggcatggtggtgtgcacctgtaatcccagctattagggtggctgaggcaggagaattgcttgaacccgggaggcggaggttgcagtgagctgagatcgtgccactgcactccagcctgggggacagagcacattataattaactgttattttttacttggactcttgtggggaataagatacatgttttattcttatttatgattcaagcactgaaaatagtgtttagcatccagcaggtgcttcaaaaccatttgctgaatgattactatactttttacaagctcagctccctctatcccttccagcatcctcatctctgattaaataagcttcagtttttccttagttcctgttacatttctgtgtgtctccattagtgacctcccatagtccaagcatgagcagttctggccaggcccctgtcggggtcagtgccccacccccgccttctggttctgtgtaaccttctaagcaaaccttctggctcaagcacagcaatgctgagtcatgatgagtcatgctgaggcttagggtgtgtgcccagatgttctcagcctagagtgatgactcctatctgggtccccagcaggatgcttacagggcagatggcaaaaaaaaggagaagctgaccacctgactaaaactccacctcaaacggcatcataaagaaaatggatgcctgagacagaatgtgacatattctagaatatattatttcctgaatatatatatatatatatatacacatatacgtatatatatatatatatatatatttgttgttatcaattgccatagaatgattagttattgtgaatcaaatatttatcttgcaggtggcctctatacctagaagcggcagaatcaggctttattaatacatgtgtatagatttttaggatctatacacatgtattaatatgaaacaaggatatggaagaggaaggcatgaaaacaggaaaagaaaacaaaccttgtttgccattttaaggcacccctggacagctaggtggcaaaaggcctgtgctgttagaggacacatgctcacatacggggtcagatctgacttggggtgctactgggaagctctcatcttaaggatacatctcaggccagtcttggtgcattaggaagatgtaggcaactctgatcctgagaggaaagaaacattcctccaggagagctaaaagggttcacctgtgtgggtaactgtgaaggactacaagaggatgaaaaacaatgacagacagacataatgcttgtgggagaaaaaacaggaggtcaaggggatagagaaggcttccagaagaatggctttgaagctggcttctgtaggagttcacagtggcaaagatgtttcagaaatgtgacatgacttaaggaactatacaaaaaggaacaaatttaaggagaggcagataaattagttcaacagacatgcaaggaattttcagatgaatgttatgtctccactgagcttcttgaggttagcagctgtgagggttttgcaggcccaggacccattacaggacctcacgtatacttgacactgttttttgtattcatttgtgaatgaatgacctcttgtcagtctactcggtttcgctgtgaatgaatgatgtcttgtcagcctacttggtttcgctaagagcacagagagaagatttagtgatgctatgtaaaaacttcctttttggttcaagtgtatgtttgtgatagaaatgaagacaggctacatgatgcatatctaacataaacacaaacattaagaaaggaaatcaacctgaagagtatttatacagataacaaaatacagagagtgagttaaatgtgtaataactgtggcacaggctggaatatgagccatttaaatcacaaattaattagaaaaaaaacagtggggaaaaaattccatggatgggtctagaaagactagcattgttttaggttgagtggcagtgtttaaagggtgatatcagactaaacttgaaatatgtggctaaataactagaatactctttattttttcgtatcatgaatagcagatatagcttgatggccccatgcttggtttaacatccttgctgttcctgacatgaaatccttaatttttgacaaaggggctattcattttcattttatattgggcctagaaattatgtagatggtcctgaggaaaagtttatagcttgtctatttctctctctaacatagttgtcagcacaatgcctaggctataggaagtactcaaagcttgttaaattgaattctatccttcttattcaattctacacatggaggaaaaactcatcagggatggaggcacgcctctaaggaaggcaggtgtggctctgcagtgtgattgggtacttgcaggacgaagggtggggtgggagtggctaaccttccattcctagtgcagaggtcacagcctaaacatcaaattccttgaggtgcggtggctcactcctgtaatcacagcagtttgggacgccaaggtgggcagatcacttgaggtcaggagttggacaccagcccagccaacatagtgaaacctggtctctgcttaaaaatataaaaattagctggacgtggtgacgggagcctgtaatccaactacttgggaggctgaggcaggagaatcgcttgaaccggggaggtggagtttgcactgagcagagatcatgccattgcactccagcctccagagcgagactctgtctaaagaaaaacgaaaacaaacaaacaaacaaacaaacaaaacccatcaaattccctgaccgaacagaattctgtctgattgttctctgacttatctaccattttccctccttaaagaaactgtggaacttccttcagctagaggggcctggctcagaagcctctggtcagcatccaagaaatacttgatgtcactttggctaaaggtatgatgtgtagacaagctccagagatggtttctcatttccatatccacccacccagctttccaattttaaagccaattctgaggtagagactgtgatgaacaaacaccttgacaaaattcaacccaaagactcactttgcctagcttcaaaatccttactctgacatatactcacagccagaaattagcatgcactagagtgtgcatgagtgcaacacacacacacaccaattccatattctctgtcagaaaatcctgttggtttttcgtgaaaggatgttttcagaggctgaccccttgccttcacctccaatgctaccactctggtctaagtcactgtcaccaccacctaaattatagctgttgactcataacaatcttcctgcttctaccactgccccactacaatttcttcccaatatactatccaaattagtcttttcaaaatgtaagtcatatatggtcacctctttgttcaaagtcttctgatagtttcctatatcatttataataaaaccaaatccttacaattctctacaatagttgttcatgcatatattatgtttattacagatacgcatatatatagctctcatataaataaatatatatatttatgtgtatgtgtgtagagtgttttttcttacaactctatgatgtaggtattattagtgtcccaaattttataatttaggacttctatgatctcatcttttattctccccttcaccgaatctcatcctacattggccttattgatattccttgaaaattctaagcatcttacatctttagggtatttacatttgccattccctatgccctaaatatttaatcatagtttcatataaatgggttcctcatcatctatgggtactctctcaggtgttaactttatagtgaggactttcctgccatactacttaaagtagcgataccctttcaccctgtcctaatcacactctggccttcatttcagttttttttttttctccatagcacctaatctcattggtatataacatgtttcatttgcttatttaatgtcaagctctttccactatcaagtccatgaaaacaggaactttattcctctattctgtttttgtgctgtattcttagcaattttacaattttgaatgaaatgaatgagcagtcaaacacatatacaactataattaaaaggatgtatgctgacacatccactgctatgcacacacaaagaaatcagtggagtagagctggaagcgctaagcctgcatagagctagttagccctccgcaggcagagccttgatgggattactgagttctagaattggactcatttgttttgtaggctgagatttgctcttgaaaacttgttctgaccaaaataaaaggctcaaaagatgaatatcgaaaccagggtgttttttacactggaatttataactagagcactcatgtttatgtaagcaattaattgtttcatcagtcaggtaaaagtaaagaaaaactgtgccaaggcaggtagcctaatgcaatatgccactaaagtaaacattattccataggtgtcagatatggcttattcatccatcttcatgggaaggatggccttggcctggacatcagtgttatgtgaggttcaaaacacctctaggctataaggcaacagagctccttttttttttttctgtgctttcctggctgtccaaatctctaatgataagcatacttctattcaatgagaatattctgtaagattatagttaagaattgtgggagccattccgtctcttatagttaaatttgagcttcttttatgatcactgtttttttaatatgctttaagttctggggtacatgtgccatggtggtttgctgcacccatcaacccgtcatctacattaggtatttctcctaatgctatccttcccctagccccccacccccaacaggccccagtgtgtgatgttcccctccctgtgtccatggatcactggttttttttttttttttttttttttttttaaagtctcagttaaatttttggaatgtaatttattttcctggtatcctaggacctgcaagttatctggtcactttagccctcacgttttgatgataatcacatatttgtaaacacaacacacacacacacacacacacacatatatatatataaaacatatatatacataaacacacataacatatttatcgggcatttctgagcaactaactcatgcaggactctcaaacactaacctatagccttttctatgtatctacttgtgtagaaaccaagcgtggggactgagaaggcaatagcaggagcattctgactctcactgcctttggctaggtccctccctcatcacagctcagcatagtccgagctcttatctatatccacacacagtttctgacgctgcccagctatcaccatcccaagtctaaagaaaaaaataatgggtttgcccatctctgttgattagaaaacaaaacaaaataaaataagcccctaagctcccagaaaacatgactaaaccagcaagaagaagaaaatacaataggtatatgaggagactggtgacactagtgtctgaatgaggcttgagtacagaaaagaggctctagcagcatagtggtttagaggagatgtttctttccttcacagatgccttagcctcaataagcttgcggttgtggaagtttactttcagaacaaactcctgtggggctagaattattgatggctaaaagaagcccgggggagggaaaaatcattcagcatcctcacccttagtgacacaaaacagagggggcctggttttccatatttcctcatgatggatgatctcgttaatgaaggtggtctgacgagatcattgcttcttccatttaagccttgctcacttgccaatcctcagttttaaccttctccagagaaatacacattttttattcaggaaacatactatgttatagtttcaatactaaataatcaaagtactgaagatagcatgcataggcaagaaaaagtccttagctttatgttgctgttgtttcagaatttaaaaaagatcaccaagtcaaggacttctcagttctagcactagaggtggaatcttagcatataatcagaggtttttcaaaatttctagacatgagattcaaagccctgcacttaaaatagtctcatttgaattaactctttatataaattgaaagcacattctgaactacttcagagtattgttttatttctatgttcttagttcataaatacattaggcaatgcaatttaattaaaaaaacccaagaatttcttagaattttaatcatgaaaataaatgaaggcatctttacttactcaaggtcccaaaaggtcaaagaaaccaggaaagtaaagctatatttcagcggaaaatgggatatttatgagttttctaagttgacagactcaagttttaaccttcagtgcccatgatgtaggaaagtgtggcataactggctgattctggctttctactcctttttcccattaaagatccctcctgcttaattaacattcacaagtaactctggttgtactttaggcacagtggctcccgaggtcagtcacacaataggatgtctgtgctccaagttgccagagagagagattactcttgagaatgagcctcagccctggctcaaactcacctgcaaacttcgtgagagatgaggcagaggtacactacgaaagcaacagttagaagctaaatgatgagaacacatggactcatagagggaaacaacgcatactggggcctatcagagggtggagggtgagagaaggagaggatcaggaaaaatcactaatggatgctaagcgtaatacctgagtgatgagatcatctatacaacaaacccccttgacattcatttatctatgtaacaaacctgcacatcctgtacacgtacccctgaacttaaaataaaagttgaaaacaagaaagcaacagtttgaacacttgttatggtctattctctcattctttacaattacactagaaaatagccacaggctcctgcaaggcagccacagaatttatgacttgtgatatccaagtcattcctggataatgcaaaatctaacacaaaatctagtagaatcatttgcttacatctatttttgttctgagaatatagatttagatacataatggaagcagaataatttaaaatctggctaatttagaatcctaagcagctcttttcctatcagtggtttacaagccttgtttatatttttcctattttaaaaataaaaataaagtaagttatttgtggtaaagaatattcattaaagtatttatttcttagataataccatgaaaaacattcagtgaagtgaagggcctactttacccaacaagaatctaatttatataatttttcatactaatagcatctaagaacagtacaatatttgactcttcaggttaaacatatgtcataaattagccagaaagatttaagaaaatattggatgtttccttgtttaaattaggcatcttacagtttttagaatcctgcatagaacttaagaaattacaaatgctaaagcaaacccaaacaggcaggaattaatcttcatcgaatttgggtgtttctttctaaaagtcctttatacttaaatgtcttaagacatacatagattttattttactaattttaattatacagacaataaatgaatattcttactgattactttttctgactgtctaatctttctgatctatcctggatggccataacacttatctctctgaactttgggcttttaatataggaaagaaaagcaataatccatttttcatggtatctcatatgataaacaaataaaatgcttaaaaatgagcaggtgaagcaatttatcttgaaccaacaagcatcgaagcaataatgagactgcccgcagcctacctgacttctgagtcaggatttataagccttgttactgagacacaaacctgggcctttcaatgctataacctttcttgaagctcctccctaccacctttagccataaggaaacatggaatgggtcagatccctggatgcaagccaggtctggaaccataggcagtaaggagagaagaaaatgtgggctctgcaactggctccgagggagcaggagagaatcaaccccatactctgaatctaagagaagactggtgtccatactctgaatgggaagaatgatgggattacccatagggcttgttttagggagaaacctgttctccaaactcttggccttgagatacctggtccttattccttggactttggcaatgtctgaccctcacattcaagttctgaggaagggccactgccttcatactgtggatctgtagcaaattccccctgaaaacccagagctgtatcttaattgtttaaaaaaattatattatctcaaggactgttcttctctgagtagccaagctcagcttggttcaagctacaagcagctgagctgctttttgtctagtcattgttcttttatttcagtggatcaaatacgttctttccaaacctaggatcttgtcttcctaggctatatattttgtcccaggaagtcttaatctggggtccacagaacactagggggctggtgaagtttatagaaaaaaaatctgtatttttacttacatgtaactgaaatttagcattttcttctactttgaatgcaaaggacaaactagaatgacatcatcagtacctattgcatagttataaagagaaaccacagatattttcatactacaccataggtattgcagatctttttgtttttgtttttgtttgagatggagtttcgctcttattgcccaggctggagtgcagtggcatgatttcggctcactgcaacctccccttcctgcattcaagcaattctcctgccttggcctccagagtagctggggattacaggcacctgccaccatgccagtctaatttttgtatttttagtagagatggggtttcgccatgttggccaggctggtcttgaactcctgacctcagatgatctgcccgccttggcctcctgaagtgctgggattataggtgtgagccaccacgcctggcccattgcagatatttttaattcacatttatctgcatcactacttggatcttaaggtagctgtagacccaatcctagatctaatgctttcataaagaagcaaatataataaatactataccacaaatgtaatgtttgatgtctgataatgatatttcagtgtaattaaacttagcactcctatgtatattatttgatgcaataaaaacatattttttttagcacttacagtctgccaaactggcctgtgacacaaaaaaagtttaggaattcctggttttgtctgtgttagccaatggttagaatatatgctcagaaagataccattggttaatagctgaaagaaaatggagtagaaattcagtggcctggaataataacaatttgggcagtcattaagtcaggtgaagacttctggaatcatgggagaaaagcaagggagacattcttacttgccacaagtgtttttttttttttttttttatcacaaacataagaaaatataataaataacaaagtcaggttatagaagagagaaacgctcttagtaaacttggaatatggaatccccaaaggcacttgacttgggagacaggagccatactgctaagtgaaaaagacgaagaacctctagggcctgaacataggaaattgtaggaacagaaattcctagatctggtggggcaaggggagccataggagaaagaaatggtagaaatggatggagacggaggcagaggtgggcagatcatgaggtcaagagatcgagaccatcctggcaaacatggtgaaatcccgtctctactaaaaataaaaaaattagctgggcatggtggcatgcgcctgtagtcccagctgctcgggaggctgaggcaggagaatcgtttgaacccaggaggcgaaggttgcagtgagctgagatagtgccattgcactccagtctggcaacagagtgagactccgtctcaaaaaaaaaaaaaagaaagaaagaaaagaaaaagaaaaaagaaaaaataaatggatgtagaacaagccagaaggaggaactgggctggggcaatgagattatggtgatgtaagggacttttatagaattaacaatgctggaatttgtggaactctgcttctattattcccccaatcattacttctgtcacattgatagttaaataatttctgtgaatttattccttgattctaaaatatgaggataatgacaatggtattataagggcagattaagtgatatagcataagcaatattcttcaggcacatggatcgaattgaatacactgtaaatcccaacttccagtttcagctctaccaagtaaagagctagcaagtcatcaaaatggggacatacagaaaaaaaaaaggacactagaggaataatataccctgactcctagcctgattaatatatcgattcacttttttctctgtttgatgacaaattctggctttaaataattttaggattttaggcttctcagctcccttcccagtgagaagtataagcaggacagacaggcaagcaagaagagagccccaggcaatactcacaaagtagccagtgtcccctgtggtcatagagaaatgaaaagagagaggattccctggaagcactggatgtaatcttttctgtctgtcctctctagggaatcaccccaaggtactgtactttgggattaaggctttagtcccactgtggactacttgctattctgttcagtttctagaaggaactatgtacggtttttgtctccctagagaaactaaggtacagaagttttgtttacaatgcactccttaagagagctagaactgggtgagattctgttttaacagctttattttcttttccttggccctgtttttgtcaactgtcaccacctttaaggcaaatgttaaatgtgctttggctgaaactttttttcctattttgagatttgctcctttatatgaggctttcttggaaaaggagaatgggagagatggatatcattttggaagatgatgaagagggtaaaaaaggggacaaatggaaatttgtgttgcagatagatgaggagccaacaaaaaagagcctcaggatccagcacacattatcacaaacttagtgtccatccatcactgctgaccctctccggacctgactccacccctgaggacacaggtcagccttgaccaatgacttttaagtaccatggagaacagggggccagaacttcggcagtaaagaataaaaggccagacagagaggcagcagcacatatctgcttccgacacagctgcaatcactagcaagctctcaggcctggcatcatggtgcattttactgctgaggagaaggctgccgtcactagcctgtggagcaagatgaatgtggaagaggctggaggtgaagccttgggcaggtaagcattggttctcaatgcatgggaatgaagggtgaatattaccctagcaagttgattgggaaagtcctcaagattttttgcatctctaattttgtatctgatatggtgtcatttcatagactcctcgttgtttacccctggacccagagattttttgacagctttggaaacctgtcgtctccctctgccatcctgggcaaccccaaggtcaaggcccatggcaagaaggtgctgacttcctttggagatgctattaaaaacatggacaacctcaagcccgcctttgctaagctgagtgagctgcactgtgacaagctgcatgtggatcctgagaacttcaaggtgagttcaggtgctggtgatgtgattttttggctttatattttgacattaattgaagctcataatcttattggaaagaccaacaaagatctcagaaatcatgggtcgagcttgatgttagaacagcagacttctagtgagcataaccaaaacttacatgattcagaactagtgacagtaaaggactactaacagcctgaattggcttaacttttcaggaaatcttgccagaacttgatgtgtttatcccagagaattgtattatagaattgtagacttgtgaaagaagaatgaaatttggcttttggtagatgaaagtccatttcaaggaaatagaaatgccttattttatgtgggtcatgataattgaggtttagaagagatttttgcaaaaaaaataaaagatttgctcaaagaaaaataagacacattttctaaaatatgttaaatttcccatcagtattgtgaccaagtgaaggcttgtttccgaatttgttggggattttaaactcccgctgagaactcttgcagcactcacattctacatttacaaaaattagacaattgcttaaagaaaaacagggagagagggaacccaataatactggtaaaatggggaagggggtgagggtgtaggtaggtagaatgttgaatgtagggctcatagaataaaattgaacctaagctcatctgaattttttgggtgggcacaaaccttggaacagtttgaggtcagggttgtctaggaatgtaggtataaagccgtttttgtttgtttgtttgttttttcatcaagttgttttcggaaacttctactcaacatgcctgtgtgttattttgtcttttgcctaacagctcctgggtaacgtgatggtgattattctggctactcactttggcaaggagttcacccctgaagtgcaggctgcctggcagaagctggtgtctgctgtcgccattgccctggcccataagtaccactgagttctcttccagtttgcaggtcttcctgtgaccctgacaccctccttctgcacatggggactgggcttggccttgagagaaagccttctgtttaataaagtacattttcttcagtaatcaaaaattgcaattttatcttctccatcttttactcttgtgttaaaaggaaaaagtgttcatgggctgagggatggagagaaacataggaagaaccaagagcttccttaagaaatgtatgggggcttgtaaaattaatgtggatgttatgggagaattcccaagattcccaaggaggatgatatgatggagaaaaatctttatcggggtgggaaaatggttaattaagtggcagagactcctaggcagtttttactgcaccggggaaagaaggagctgttgtggtacctgagaaagcagatttgtggtacatgtcacttttcattaaaaacaaaaacaaaacaaaacaaaacttcatagatatccaagatataggctgagaattactattttaatttactcttatttacattttgaagtagctagcttgtcacatgttttatgaaattgatttggagataagatgagtgtgtatcaacaatagcctgctctttccatgaaggattccattatttcatgggttagctgaagctaagacacatgatatcattgtgcattatcttctgatacaatgtaacatgcactaaaataaagttagagttaggacctgagtgggaaagtttttggagagtgtgatgaagactttccgtgggagatagaatactaataaaggcttaaattctaaaaccagcaagctagggcttcgtgacttgcatgaaactggctctctggaagtagaagggagagtaagacatacgtagaggactaggaaagaccagatagtacagggcctggctacaaaaatacaagcttttactatgctattgcaatactaaacgataagcattaggatgttaagtgactcaggaaataagattttgggaaaaagtaatctgcttatgtgcacaaaatggattcaagtttgcagataaaataaaatatggatgatgattcaaggggacagatacaatggttcaaacccaagaggagcagtgagtctgtggaattttgaaggatggacaaaggtggggtgagaaagacatagtattcgacctgactgtgggagatgagaaggaagaaggaggtgataaatgactgaaagctcccagactggtgaagataacaggaggaaaccatgcacttgaccctggtgactctcatgtgtgaagggtagagggatattaacagatttactttttaggaagtgctagattggtcagggagttttgaccttcaggtcttgtgtctttcatatcaaggaacctttgcattttccaagttagagtgccatattttggcaaatataactttattagtaattttatagtgctctcacattgatcagactttttcctgtgaattacttttgaatttggctgtatatatccagaatatgggagagagacaaataattattgtagttgcaggctatcaacaatactggtctctctgagccttataacctttcaatatgccccataaacagagtaaacagggattattcatggcactaaatattttcacctaggtcagtcaacaaatggaggcaatgtgcattttttgatacatatttttatatatttatggggcatgtgatacttacatgcctagaacatgtgactgattaagtctagatatttaggatatccattactttgagcatttatcatttctatgtattgagaaaatttcaaatcctcatttctgaccattttgaaatatataataaatagtaattaactatagtcaccctactcaaatatcaacattataaactaactaatccttctttccacttttttaccaaccaacatctcttaaatcccctgccatacacatcacacatttttcagctctgataactatcattctactctcataccaccatgagaccacttttttagctccacagatgaataaaaacatgtgatatttgactttctgtatctggcttattttattatctatctctttggcataccaagagtttgtttttgttctgcttcagggctttcaattaacataatgacctctggttccatccatgttgctacaaatgacaagatttcattctttttcatggcaaaatagtactgtgcaaaaaatacaattttttaatccgttcatctgttgatagacacttaggttgatcccaaaccttaactattgtgaataggtgcttcaataaacatgagtgtaatgtgtccattggatatactgatttcctttcttttggataaataaccactagtgagattgctggattgtatgatagttctgtttttagtttattgagaaatcttcatactgttttccataatggttgtactattttacattcccaccaacagtgtgtaagaaagagttcccttttctccatatcctcacaaggatctgttattttttgtcttttttgttaatagcattttaactagagtaagtagatatctcattgtagttttgatttgcatttccctgatcattagtgatgttgagattttttcatatgtttgttggtcatttgtatatctttttctgagattgtctgttcatgtccttatcctacttttattgggattgttgttattttcttgataatcattgtgtcattttagagcctggatattattcttttgtcagatgtatagattgtgaagattttctcctctgtgggttgtctgtttattctgcagactcttccttttgccatgcaaaagctctttagtttaatttagtcccagatattttctttgtttttatgtgtttgcatttgtgttcttgtcatgaaatcctttcctaagccaatgtgtagaagggtttttccgatgttattttctagaattgttacagtttcaggcttagatttaagtccttgatccatcttaagttgatttttgtataaggtgagagatgaagatccagtttcattctcctacatgtagcttgccagctatcccgactcatttgttgaatagggtgccctttcccatttatgtttttgtttgctttgtcaaagatcagttcggatgtaagtatttgagtttatttctgggttctctattctgttccattggtccgatgtgcctatttgtacaccagcatcatgctgtgtttttggtgactatggccttattgtatagtttgaaatgaggtaatgtaatgccattcagatttgttcttttttttagacttgcttgtttattgggctcttttttggttccataagaattttaggattgttttttctagttctgtgaaggctaatggtggtatttatgggaattgcaatgcaatttgtaggttgcttctggcattatggccattttcacaatattgattctacccatctatgagaatggcatgtgtttccatttgtttgtgtcttatatgattactatcagccgtgttttgtagttttccttgtagatgtctttcacctccttggttaggtatatattcctaagtttttgttttgttttgttttgttttttgcagctattgtaaaaggggttgagttattgattttattctcatcttggtcattgctggtatgtaagaaagcaactcattggtgtacgttaattttgtatccagaaactttgctgaattattttatcagttctagggggttttggaggagtctttagagttttctacatacacaatcatatcatcagcaaacagtgacagtttgactttctctttaacaatttggatgtgctttacttgtttctcttgtctgattgctcttgctaggacttccagtaatatgttaaagagaagtggtgagagtgggtatccttgtctcattccagttttcagacagaatgcttttaactttttcccattcaatataatgttggctgtgtgtttaccatagctggcttttattacattgaggtatgtcctttgtaaaccgattttgctgagttttagtcataaagtgatgttgaattttgttgaatgcagtttctgtggctattgagataatcacatgatttttgtttccaattctctttatgttgtgtatcacacttattgacttgcgtatgttaaaccatccgtgcatccctcgcatgaaaccacttgatcatgggttttgatatgccgtgtgggatgctattagctatattttgtcaaggatgttggcatctatgttcatcagggatattgatctgtagtgttttttttttttggttatgttctttcccagttttggtattaaggtgatactggcttcatagaatgatttagggaggattctctctttctctatcttgtagaatactgtcaataggattggtatcaattcttctttgaatgtctggtagaattcgaacgtctcctttaggttttctagtttattcatgtaaaggtgttcatagtaaccttgaataatcttttgtatttctgtggtatcagtaatagtatctcctgttttgtttctaactgagtttatttgcacttctctcctcttttcttggttaatcttgctaatggtctatcagttttatttatcttttcaaagaaccagctttttatttcatttagcttttgtatttttttgcagttgttttaatttcatttagttctcctcttatcttagttattccctttcttttgctgggttttggttctgtttgtttttgtttctctagtttcttgtggtgtgaccttatattgtctgtcctctttcagactctttgacatcgacatttagggctgtgaactttccttttagcaccatctttgctgtatcctagaggttttgataggtgtgtcactattgtcggtcagttcaagtaattttgttgttcttattatactttaagttctgggatacatgtgcagaatgtgcaggtttgttacataggtatagatgtgccatggtggtttgctgctcccatcaacctgtcatctacattaggtatttcttttaatgttatccctctcctaaccccctcaccccccgacaggccctggtgtgtgatgttcccctccctgtgtccatgtgttctcattgttcaactcccacttatgagtgagaacgtgtggtgtttggtttctctgttcctgtgttagtttgctcagaatgatgtttccaccttcaccatgtccctgcaaagacatgaactcatcattttatggctgcatatattccatggtgtatatgtgccacattttctttatccattatatcgctgatggccatttgggttggttccaagtctttggtattgtgaatagtgccgcaataaacatacgtgtgcacatgtctttatagtagaatgatttctaattctttgggtatatacccagtaatgggattgctgggtcaaacagtatttctggttctagatccttgaggaattgccacactgtcttccacaatggttgaactaatttacacacccatcaacagtgtaaaatttttcctattcttccacatcctctccagcaccttttgtttcctgactttttaataattgccattctaactggcatgagatggtatctcattgtggttttgatttgcatttctctaatgaccagtgatgatgagcttcttttcatgtgtttcttggccacataaatgacttctttagagaagcatctgttcatatcctttgtccactttttgatggggtcgttaggttttttcttgtaaatttgttgaagttctttgtagattttggatgttagccctttgtcagatggatagattggcaaaaattttctcccattctgtaggttgcctgttcactctgatgatagtcttttgctgtgcagaagctctttagtttaattagatcccatatgtcaattttggcctttgttgtcattgcttttgatgtttagtcgtggaattttgcccatgcctatgtcctgaatggtattgcctaggttatcttctaggatttttatggttttaggttgcacatttaagtctttaatccaccttgagttaatttttgtataaggtgtaaggaaggggtacagtttcagttttatgcatattgctagccagtttttccagcaccatttattaaatagggaattctttctccattgcttttgtgatgtttgtcaaagatcagatggtcgtagatgtgtggcattatttctgaggcttctgttctgttccactggtctatatatctgttttggtaccagtaccatgctgtttttgttactgtagccttgtagtatagcttgaagtcaggtagcatcatgcctccagctttgttctttttgtttaggattgtcttggctatatgggctcttttttgattccatatgacatttaaagtagttttttctaattctttgaaaaaagtcagtggtagcttgatggggatagcattgaatctataaattactttgggcagtatggccattttaaagatattgattctttctatctatgagcatggaatgtttttccatttgtttgtgtcctctcttatttccttgagcagtgagtggtttgtagctctccttgaagaggttcttcacatcccttataagttgtatttctaggtattttattttattctctttgcagcaattgtgaatgggagttcacccatgatttggctctctgcttgtctattattggtgtataggaatgcttgtgatttttgcacactgattttgtatcttgagactttgctgaagctgtttatcagcttaagattttgggctgagatgacagggtcttctaaatatacaatcatgtcatctgcaaacagagacaatttgacttcctctcttcctatttgaatatgctttatttctttctcttgcctgattgtcctggcgagaacttccaatactatgttgagtaagagtggcgagagggcatccttgtcttgtgccggttttcaaagcaaatgatttttaaatttccgtcttgatttcattgttgacccaatgatcattcaggagcaggttatttaatttccctgtatttgcatggttttgaaggttccttttgtagttgatttccaattttattctactgtggtctgagagagtgcttgatataatttcaatttttaaaaatttattgaggcttgttttgtggcatatcatatggcctatcttggagaaagttccatgtgctgatgaatagaatgtgtattctgcagttgttgggtagaatgtcctgtaaatatctgttaagtccatttgttctttaaatccattgtttctttgtagactgtcttgatgacctgcctagtgcagtcagtggagtattgaagtcccccactattattatgttgctgtctagtagtaattgttttataaatttgggatctccagtattagatgcatatatattaagaattgtaatattctcccattggacaagggcttttatcattatatgatgtccctctttgtcttttttaactgctgtttctttaaagtttgttttgtctgacataagaatagctgctttggctcgcttttggtgtccatttgtgtggaatgtcattttccacccctttaccttaagtttatgtgagtccttatgtgttaggtgagtctcctgaaggcggcagataactggttggtgaattctattcattctgcaattctgtatcttttaagtggagcatttagtccatttacattcaacatcagtattgaggtgtgaggtgactattccattcttcgtggtatttgttgcctgtgtatctttttatctgtatttttgttgtatatgtcctatgggatttatgctttaaagaggttctgttttgatgtgcttccagggtttatttcaagatttagagctccttttatcattcttgtagtgttggcttggtagtgccgaattctctcagcatttgtttttctgaaaaacactgtgtattttcttcatttgtgaagcttagtttcactggatataaaattcttggctgataattgttttgtttaagaaggctgaagatagggccatattcacttctagcttttacggtttctgctgagaaatctgctgttaatctgataggttttctttcataggttacctggtagtttcacctcacagctcttaagattctctttgtctttagataactttggatactctgatgacaatgtacctaggcaatgatatttttgcaatgaatttcccaggtgtttattgagcttctttgtatttggatatctaggtctctagcaaggagggggaagttttccttgattatttccatggacaagttttccaaacttttagatttctcttctttctcaggaatgctgattattcttaggtttgattgtttaacataatcccagatttcttggaggctttgttcatattttcttattcttttttctttgtctttgttggattgggtaattcaaaaactttgtcttcaagctctgaatttcttctgcttggattctattgctgagactttctagagcattttgcatttctataagtgcatccattcatccattgtttcctgaagttttgaatgttttttatttatgctatctctttaactgaagatttctcccctcatttcttgtatcatatttttggtttttttaaaattggacttcaccttcctcggatgcctccttgattagcttaataactgaccttctgaattatttttcaggtaaatcagggatttcttcttggtttggatgcattgctggtgagctagtatgattttttggggggtgttaaagaaccttgtttttcatattaccagagttagttttctggttccttctcacttgggtaggctctgtcagagggaaagtctaggcctcaaggctgagacttttgtcccagcaggtgttcccttgatgtagcacagtcccccttttcctaggacgtggggcttcctgagagccgaactgtagtgattgttatctctcttctggatctagccacccatcaggtctaccagactccaggctggtactggggtttgtctgcacagagtcttgtgacgtgaaccatctgtgggtctctcagccatagatacaaccacctgctccaatggaggtggtagaggatgaaatgaactctgtgagggtccttacttttggttgttcaatgcactatctttttgtgctggttggcctcctgccaggaggtggcactttctagaaagcatcagcagaggcagtcaggtggtggtggctgggggggctggggcactagaactcccaagaatatatgccctttgtcttcagctactagggtgagtaaggaaggaccatcaggtgggggcaggactagtcgtgtctgagctcagagtctccttgggcaggtctttctgtggctactgtgggaggatgggggtgtagtttccaggtcaatggatttatgttcctaggacaattatggctgcctctgctgtgtcatgcaggtcatcaggaaagtgggggaaagcaagcagtcacgtgacttgcccagctcccatgcaactcaaaaggttggtctcacttccagcgtgcaccctcccccgcaacagctccgaatctgtttccatgcagtcagtgagcaaggctgagaacttgcccaggctaccagctgcgaaaccaagtagggctgtcctacttccctgccagtggagtctgcacaccaaattcatgtccccccaccaacccccccactgcccagcccctagatctggccaggtggagattttctttttcctgtctcttttcccagttcctctggcagccctcccaaatgacccctgtgaggcaaggcagaaatggcttcctaggggacccagagagcccacagggcttttcccgctgcttcctctacccctgtattttgcttggccctctaaattgactcagctccaggtaaggtcagaatcttctcctgtggtctagatcttcaggttcccagtgaggatgtgtgtttgggggtagacggtcccccttttccacttccacagtttgggcactcacaatatttggggtgtttcccgggtcctacatgagcaatctgcttctttcagagggtgtgtgcgttctctcagctttcttgaatttatttctgcaggtggttctgcaaaaaaaattcctgatgggagacttcacatgctgctctgtgcatccgagtgggagctgcaatgtacttctgctgccacccatctgccatcaccctctaatttgtcggtaatatgcatttttaatcaatctttttttctctctctctcttttcttctcccccaaaactatactgccctttgatatcaaggaatcaaggccgtgatgttgaggggtgggcagtggatacactctttaccccttagggagcatatctagatttagatattgccaattcaagataacttaattgaaagcaaattcataatgaatacacacacacacacacacatctgcatgacaagatttttaatagttgaaagaataactaataattgtccacaggcaataagggctttttaagcaaaacagttgtgataaaacaggtcattcttagaatagtaatccagccaatagtacaggttgcttagagattatgacattaccagagttaaaattcaataatggcttctcactccctaccactgaggacaagtttatgtccttaggtttatgcttccctgaaacaataccacctgctattctccactttacatatcaacggcactggttctttatctaactctctggcacagcaggagtttgttttcttctgcttcagagctttgaatttactatttcagcttctaaactttatttgcaatgccttcccatggcagactccttctgtcattttgcctctgttcgaaaactttttccttaatttcattcttagttaataatatctgaaattattttgttgtttaacttaattattaattttatgtatgttctacctagatataatcttctagaggattgttttattctctgacttatttaacttaaatgcccactacctttaaaaattatgacatttatttaacagatatttgctgaacaaatgtttgaaaatacatgggaaagaatgcttgaaaacacttgaaattgcttgtgtaaagaaacagttttatcagttaggatttaatcaatgtcagaagcaatgatataggaaaaatcgaggaataagacagttatggataaggagaaatcaacaaactcttaaaagatattgcctcaaaagcataagaggaaataagggtttatacatgacttttagaacactgcctgggtttttggataaatggggaagttgttggaaaacaggagggatcctagatattccttagtctgaggaggagcaattaagattcacttgtttagaggctgggagtggtggctcacgcctgtaatcccagaattttgggaggccaaggcaggcagatcacctgaggtcaagagttcaagaccaacctggccaacatggtgaaatcccatctctacaaaaatacaaaaattagacaggcatgatggcaagtgcctgtaatcccagctacttgggaggctgaggaaggagaattgcttgaacctggaaggcaggagttgcagtgagccgagatcataccactgcactccagcctgggtgacagaacaagactctgtctcaaaaaaaaaaaagagagattcaaaagattcacttgtttaggccttagcgggcttagacaccagtctctgacacattcttaaaggtcaggctctacaaatggaacccaaccagactctcagatatggccaaagatctatacacacccatctcacagatcccctatcttaaagagaccctaatttgggttcacctcagtctctataatctgtaccagcataccaataaaaatctttctcacccatccttagattgagagaagtcacttattattatgtgagtaactggaagatactgataagttgacaaatctttttctttcctttcttattcaacttttattttaacttccaaagaacaagtgcaatatgtgcagctttgttgcgcaggtcaacatgtatctttctggtcttttagccgcctaacactttgagcagatataagccttacacaggattatgaagtctgaaaggattccaccaatattattataattcctatcaacctgataagttaggggaaggtagagctctcctccaataagccagatttccagagtttctgacgtcataatctaccaaggtcatggatcgagttcagagaaaaaacaaaagcaaaaccaaacctaccaaaaaataaaaatcccaaagaaaaaataaagaaaaaaacagcatgaatacttcctgccatgttaagtggccaatatgtcagaaacagcactgagttacagataaagatgtctaaactacagtgacatcccagctgtcacagtgtgtggactattagtcaataaaacagtccctgcctcttaagagttgttttccatgcaaatacatgtcttatgtcttagaataagattccctaagaagtgaacctagcatttatacaagataattaattctaatccatagtatctggtaaagagcattctaccatcatctttaccgagcatagaagagctacaccaaaaccctgggtcatcagccagcacatacacttatccagtgataaatacacatcatcgggtgcctacatacatacctgaatataaaaaaaatacttttgctgagatgaaacaggcgtgatttatttcaaataggtacggataagtagatattgaagtaaggattcagtcttatattatattacataacattaatctattcctgcactgaaactgttgctttataggatttttcactacactaatgagaacttaagagataatggcctaaaaccacagagagtatattcaagaataagtatagcacttcttatttggaaaccaatgcttactaaatgagactaagacgtgtcccatcaaaaatcctggacctatgcctaaaacacatttcacaatccctgaacttttcaaaaattggtacatgctttaactttaaactacaggcctcactggagctacagacaagaaggtgaaaaacggctgacaaaagaagtcctggtatcttctatggtgggagaagaaaactagctaaagggaagaataaattagagaaaaattggaatgactgaatcggaacaaggcaaaggctataaaaaaaattaagcagcagtatcctcttgggggccccttccccacactatctcaatgcaaatatctgtctgaaacggttcctggctaaactccacccatgggttggccagccttgccttgaccaatagccttgacaaggcaaacttgaccaatagtcttagagtatccagtgaggccaggggccggcggctggctagggatgaagaataaaaggaagcacccttcagcagttccacacactcgcttctggaacgtctgaggttatcaataagctcctagtccagacgccatgggtcatttcacagaggaggacaaggctactatcacaagcctgtggggcaaggtgaatgtggaagatgctggaggagaaaccctgggaaggtaggctctggtgaccaggacaagggagggaaggaaggaccctgtgcctggcaaaagtccaggtcgcttctcaggatttgtggcaccttctgactgtcaaactgttcttgtcaatctcacaggctcctggttgtctacccatggacccagaggttctttgacagctttggcaacctgtcctctgcctctgccatcatgggcaaccccaaagtcaaggcacatggcaagaaggtgctgacttccttgggagatgccataaagcacctggatgatctcaagggcacctttgcccagctgagtgaactgcactgtgacaagctgcatgtggatcctgagaacttcaaggtgagtccaggagatgtttcagcactgttgcctttagtctcgaggcaacttagacaactgagtattgatctgagcacagcagggtgtgagctgtttgaagatactggggttgggagtgaagaaactgcagaggactaactgggctgagacccagtggcaatgttttagggcctaaggagtgcctctgaaaatctagatggacaactttgactttgagaaaagagaggtggaaatgaggaaaatgacttttctttattagatttcggtagaaagaactttcacctttcccctatttttgttattcgttttaaaacatctatctggaggcaggacaagtatggtcgttaaaaagatgcaggcagaaggcatatattggctcagtcaaagtggggaactttggtggccaaacatacattgctaaggctattcctatatcagctggacacatataaaatgctgctaatgcttcattacaaacttatatcctttaattccagatgggggcaaagtatgtccaggggtgaggaacaattgaaacatttgggctggagtagattttgaaagtcagctctgtgtgtgtgtgtgtgtgtgtgcgcgcgtgtgtttgtgtgtgtgtgagagcgtgtgtttcttttaacgttttcagcctacagcatacagggttcatggtggcaagaagataacaagatttaaattatggccagtgactagtgctgcaagaagaacaactacctgcatttaatgggaaagcaaaatctcaggctttgagggaagttaacataggcttgattctgggtggaagcttggtgtgtagttatctggaggccaggctggagctctcagctcactatgggttcatctttattgtctcctttcatctcaacagctcctgggaaatgtgctggtgaccgttttggcaatccatttcggcaaagaattcacccctgaggtgcaggcttcctggcagaagatggtgactggagtggccagtgccctgtcctccagataccactgagctcactgcccatgatgcagagctttcaaggataggctttattctgcaagcaatacaaataataaatctattctgctaagagatcacacatggttgtcttcagttcttttttttatgtctttttaaatatatgagccacaaagggttttatgttgagggatgtgtttatgtgtatttatacatggctatgtgtgtttgtgtcatgtgcacactccacacttttttgtttacgttagatgtgggttttgatgagcaaataaaagaactaggcaataaagaaacttatacatgggagcgtctgcaagtgggagtaaaaggtgcaggagaaatctggttggaagaaagacctctataggacaggactcctcagaaacagatgttttggaagagatggggaaaggttcagtgaagggggctgaacccccttccctggattgcagcacagcagcgaggaaggggctcaacgaagaaaaagtgttccaagctttaggaagtcaaggtttaggcagggatagccattctattttattaggggcaatactatttccaacggcatctggcttttctcagcccttgtgaggctctacggggaggttgaggtgttagagatcagagcaggaaacaggtttttctttccacggtaactacaatgaagtgatccttactttactaaggaactttttcattttaagtgttgacgcatgcctaaagaggtgaaattaatcccatacccttaagtctacagactggtcacagcatttcaaggaggagacctcattgtaagcttctagggaggtggggacctaggtgaaggaaatgagccagcagaagctcacaagtcagcatcagcgtgtcatgtctcagcagcagaacagcacggtcagatgaaaatatagtgtgaagaatttgtataacattaattgagaaggcagattcactggagttcttatataattgaaagttaatgcacgttaataagcaagagtttagtttaatgtgatggtgttatgaacttaacgcttgtgtctccagaaaattcacatgctgaatccccaactcccaattggctccatttgtgggggaggctttggaaaagtaatcaggtttagaggagctcatgagagcagatccccatcatagaattattttcctcatcagaagcagagagattagccatttctcttccttctggtgaggacacagtgggaagtcagccacctgcaacccaggaagagagccctgaccaggaaccagcagaaaagtgagaaaaaatcctgttgttgaagtcacccagtctatgctattttgttatagcaccttgcactaagtaaggcagatgaagaaagagaaaaaaataagcttcggtgttcagtggattagaaaccatgtttatctcaggtttacaaatctccacttgtcctctgtgtttcagaataaaataccaactctactactctcatctgtaagatgcaaatagtaagcctgatcccttctgtctaacttcgaattctattttttcttcaacgtactttaggcttgtaatgtgtttatatacagtgaaatgtcaagttctttctttatatttctttctttcttttttttcctcagcctcagagttttccacatgcccttcctaccttcaggaacttctttctccaaacgtcttctgcctggcctccattcaaatcataaaggacccacttcaaatgccatcactcactaccatttcacaattcgcactttctttctttgtcctttttttttttagtaaaacaagtttataaaaaattgaaggaataaatgaatggctacttcataggcagagtagacacaagggctactggttgccgatttttattgttatttttcaatagtatgctaaacaaggggtagattatttatgctgcccatttttagaccataaaagataacttcctgatgttgccatggcattttttttccttttaattttatttcatttcattttaatttcgaaggtacatgtgcaggatgtgcaggcttgttacatgggtaaatgtgtgtctttctggccttttagccatctgtatcaatgagcagatataagctttacacaggatcatgaaggatgaaagaatttcaccaatattataataatttcaatcaacctgatagcttaggggataaactaatttgaagatacagcttgcctccgataagccagaattccagagcttctggcattataatctagcaaggttagagatcatggatcactttcagagaaaaacaaaaacaaactaaccaaaagcaaaacagaaccaaaaaacctccataaatacttcctacccagttaatggtccaatatgtcagaaacagcactgtgttagaaataaagctgtctaaagtacactaatattcgagttataatagtgtgtggactattagtcaataaaaacaacccttgcctctttagagttgttttccatgtacacgcacatcttatgtcttagagtaagattccctgagaagtgaacctagcatttatacaagataattaattctaatccacagtacctgccaaagaacattctaccatcatctttactgagcatagaagagctacgccaaaaccctgggtcatcagccagcacacacacttatccagtggtaaatacacatcatctggtgtatacatacatacctgaatatggaatcaaatatttttctaagatgaaacagtcatgatttatttcaaataggtacggataagtagatattgaggtaagcattaggtcttatattatgtaacactaatctattactgcgctgaaactgtggtctttatgaaaattgttttcactacactattgagaaattaagagataatggcaaaagtcacaaagagtatattcaaaaagaagtatagcactttttccttagaaaccactgctaactgaaagagactaagatttgtcccgtcaaaaatcctggacctatgcctaaaacacatttcacaatccctgaacttttcaaaaattggtacatgctttagctttaaactacaggcctcactggagctacagacaagaaggtaaaaaacggctgacaaaagaagtcctggtatcctctatgatgggagaaggaaactagctaaagggaagaataaattagagaaaaactggaatgactgaatcggaacaaggcaaaggctataaaaaaaattaagcagcagtatcctcttgggggccccttccccacactatctcaatgcaaatatctgtctgaaacggtccctggctaaactccacccatgggttggccagccttgccttgaccaatagccttgacaaggcaaacttgaccaatagtcttagagtatccagtgaggccaggggccggcggctggctagggatgaagaataaaaggaagcacccttcagcagttccacacactcgcttctggaacgtctgagattatcaataagctcctagtccagacgccatgggtcatttcacagaggaggacaaggctactatcacaagcctgtggggcaaggtgaatgtggaagatgctggaggagaaaccctgggaaggtaggctctggtgaccaggacaagggagggaaggaaggaccctgtgcctggcaaaagtccaggtcgcttctcaggatttgtggcaccttctgactgtcaaactgttcttgtcaatctcacaggctcctggttgtctacccatggacccagaggttctttgacagctttggcaacctgtcctctgcctctgccatcatgggcaaccccaaagtcaaggcacatggcaagaaggtgctgacttccttgggagatgccataaagcacctggatgatctcaagggcacctttgcccagctgagtgaactgcactgtgacaagctgcatgtggatcctgagaacttcaaggtgagtccaggagatgtttcagcactgttgcctttagtctcgaggcaacttagacaactgagtattgatctgagcacagcagggtgtgagctgtttgaagatactggggttgggagtgaagaaactgcagaggactaactgggctgagacccagtggcaatgttttagggcctaaggagtgcctctgaaaatctagatggacaactttgactttgagaaaagagaggtggaaatgaggaaaatgacttttctttattagatttcggtagaaagaactttcacctttcccctatttttgttattcgttttaaaacatctatctggaggcaggacaagtatggtcgttaaaaagatgcaggcagaaggcatatattggctcagtcaaagtggggaactttggtggccaaacatacattgctaaggctattcctatatcagctggacacatataaaatgctgctaatgcttcattacaaacttatatcctttaattccagatgggggcaaagtatgtccaggggtgaggaacaattgaaacatttgggctggagtagattttgaaagtcagctctgtgtgtgtgtgtgtgtgtgtgtgtgtcagcgtgtgtttcttttaacgtcttcagcctacaacatacagggttcatggtgggaagaagatagcaagatttaaattatggccagtgactagtgcttgaaggggaacaactacctgcatttaatgggaaggcaaaatctcaggctttgagggaagttaacataggcttgattctgggtggaagctgggtgtgtagttatctggaggccaggctggagctctcagctcactatgggttcatctttattgtctcctttcatctcaacagctcctgggaaatgtgctggtgaccgttttggcaatccatttcggcaaagaattcacccctgaggtgcaggcttcctggcagaagatggtgactgcagtggccagtgccctgtcctccagataccactgagcctcttgcccatgattcagagctttcaaggataggctttattctgcaagcaatacaaataataaatctattctgctgagagatcacacatgattttcttcagctcttttttttacatctttttaaatatatgagccacaaagggtttatattgagggaagtgtgtatgtgtatttctgcatgcctgtttgtgtttgtggtgtgtgcatgctcctcatttatttttatatgagatgtgcattttgatgagcaaataaaagcagtaaagacacttgtacacgggagttctgcaagtgggagtaaatggtgttggagaaatccggtgggaagaaagacctctataggacaggacttctcagaaacagatgttttggaagagatgggaaaaggttcagtgaagacctgggggctggattgattgcagctgagtagcaaggatggttcttaatgaagggaaagtgttccaagctttaggaattcaaggtttagtcaggtgtagcaattctattttattaggaggaatactatttctaatggcacttagcttttcacagcccttgtggatgcctaagaaagtgaaattaatcccatgccctcaagtgtgcagattggtcacagcatttcaagggagagacctcattgtaagactctgggggaggtggggacttaggtgtaagaaatgaatcagcagaggctcacaagtcagcatgagcatgttatgtctgagaaacagaccagcactgtgagatcaaaatgtagtgggaagaatttgtacaacattaattggaaggtttacttaatggaatttttgtatagttggatgttagtgcatctctataagtaagagtttaatatgatggtgttacggacctggtgtttgtgtctcctcaaaattcacatgctgaatccccaactcccaactgaccttatctgtgggggaggcttttgaaaagtaattaggtttagctgagctcataagagcagatccccatcataaaattattttccttatcagaagcagagagacaagccatttctctttcctcccggtgaggacacagtgagaagtccgccatctgcaatccaggaagagaaccctgaccacgagtcagccttcagaaatgtgagaaaaaactctgttgttgaagccacccagtcttttgtattttgttatagcaccttacactgagtaaggcagatgaagaaggagaaaaaaataagcttgggttttgagtgaactacagaccatgttatctcaggtttgcaaagctcccctcgtcccctatgtttcagcataaaatacctactctactactctcatctataagacccaaataataagcctgcgcccttctctctaactttgatttctcctatttttacttcaacatgctttactctagccttgtaatgtctttacatacagtgaaatgtaaagttctttattctttttttctttctttcttttttctcctcagcctcagaatttggcacatgcccttccttctttcaggaacttctccaacatctctgcctggctccatcatatcataaaggtcccacttcaaatgcagtcactaccgtttcaggatatgcactttctttcttttttgttttttgttttttttaagtcaaagcaaatttcttgagagagtaaagaaataaacgaatgactactgcataggcagagcagccccgagggccgctggttgttccttttatggttatttcttgatgatatgttaaacaagttttggattatttatgccttctctttttaggccatatagggtaactttctgacattgccatggcatgtttcttttaatttaatttactgttaccttaaattcaggggtacacgtacaggatatgcaggtttgttttataggtaaaagtgtgccatggttttaatgggttttttttttcttgtaaagttgtttaagtttcttgtttactctggatattggcctttgtcagaagaatagattggaaaatctttttcccattctgtagattgtctttcgctctgatggtagtttcttttgctgagcaggagctctttagtttaattagattccattggtcaatttttgcttttgctgcaattgcttttcacgctttcatcatgaaatctgtgcccgtgtttatatcatgaatagtattgccttgatttttttctaggctttttatagtttggggtttttcatttaagtctctaatccatccggagttaattttggataaggtataaggaaggagtccagtttcatttttcagcatatggctagccagttctcccccatcatttattaaattgaaaatcctttccccattgcttgcttttgtcaggtttctaaaagacagatggttgtaggtacaatatgcagtttcttcaagtcatataataccatctgaaatctcttattaattcatttcttttagtatgtatgctggtctcctctgctcactatagtgagggcaccattagccagagaatctgtctgtctagttcatgtaagattctcagaattaagaaaaatggatggcatatgaatgaaacttcatggatgacatatggaatctaatgtgtatttgttgaattaatgcataagatgcaacaagggaaaggttgacaactgcagtgataacctggtattgatgatataagagtctatagatcacagtagaagcaataatcatggaaaacaattggaaatggggaacagccacaaacaagaaagaatcaatactaccaggaaagtgactgcaggtcacttttcctggagcgggtgagagaaaagtggaagttgcagtaactgccgaattcctggttggctgatggaaagatggggcaactgttcactggtacgcagggttttagatgtatgtacctaaggatatgaggtatggcaatgaacagaaattcttttgggaatgagttttagggccattaaaggacatgacctgaagtttcctctgaggccagtccccacaactcaatataaatgtgtttcctgcatatagtcaaagttgccacttctttttcttcatatcatcgatctctgctcttaaagataatcttggttttgcctcaaactgtttgtcactacaaactttccccatgttcctaagtaaaacaggtaactgcctctcaactatatcaagtagactaaaatattgtgtctctaatatcagaaattcagctttaatatattgggtttaactctttgaaatttagagtctccttgaaatacacatgggggtgatttcctaaactttatttcttgtaaggatttatctcaggggtaacacacaaaccagcatcctgaacctctaagtatgaggacagtaagccttaagaatataaaataaactgttcttctctctgccggtggaagtgtgccctgtctattcctgaaattgcttgtttgagacgcatgagacgtgcagcacatgagacacgtgcagcagcctgtggaatattgtcagtgaagaatgtctttgcctgattagatataaagacaagttaaacacagcattagactatagatcaagcctgtgccagacacaaatgacctaatgcccagcacgggccacggaatctcctatcctcttgcttgaacagagcagcacacttctcccccaacactattagatgttctggcataattttgtagatatgtaggatttgacatggactattgttcaatgattcagaggaaatctcctttgttcagataagtacactgactactaaatggattaaaaaacacagtaataaaacccagttttccccttacttccctagtttgtttcttattctgctttcttccaagttgatgctggatagaggtgtttatttctattctaaaaagtgatgaaattggccgggcgcggtggctcacacctgtaatcccagcactttgggaggctgaggtgggcggatcacgaggtcaggagatcaagaccatcctggctaacatggtgaaaccccatctctactaaaaatacaaaaaattagccagagacggtggcgggtgcctgtagtcccagctactcgggaggctgaggcaggagaatggcgtgaacctgggaggcagagctgcagtgagcagagatcgcgccactgcacactccagcctgggtgacaaagcgagactccatctcaaaaaaaaaaaaaaaaaaaaaaagaaagaaagaaagaaaaaaaaagtgatgaaattgtgtattcaatgtagtctcaagagaattgaaaaccaagaaaggctgtggcttcttccacataaagcctggatgaataacaggataacacgttgttacattgtcacaactcctgatccaggaattgatggctaagatattcgtaattcttatccttttcagttgtaacttattcctatttgtcagcattcaggttattagcggctgctggcgaagtccttgagaaataaactgcacactggatggtgggggtagtgtaggaaaatggaggggaaggaagtaaagtttcaaattaagcctgaacagcaaagttcccctgagaaggccacctggattctatcagaaactcgaatgtccatcttgcaaaacttccttgcccaaaccccacccctggagtcacaacccacccttgaccaatagattcatttcactgagggaggcaaagggctggtcaatagattcatttcactgggagaggcaaagggctgggggccagagaggagaagtaaaaagccacacatgaagcagcaatgcaggcatgcttctggctcatctgtgatcaccaggaaactcccagatctgacactgtagtgcatttcactgctgacaagaaggctgctgccaccagcctgtgaagcaaggttaaggtgagaaggctggaggtgagattctgggcaggtaggtactggaagccgggacaaggtgcagaaaggcagaaagtgtttctgaaagagggattagcccgttgtcttacatagtctgactttgcacctgctctgtgattatgactatcccacagtctcctggttgtctacccatggacctagaggtactttgaaagttttggatatctgggctctgactgtgcaataatgggcaaccccaaagtcaaggcacatggcaagaaggtgctgatctccttcggaaaagctgttatgctcacggatgacctcaaaggcacctttgctacactgagtgacctgcactgtaacaagctgcacgtggaccctgagaacttcctggtgagtagtaagtacactcacgctttcttctttacccttagatatttgcactatgggtacttttgaaagcagaggtggctttctcttgtgttatgagtcagctatgggatatgatatttcagcagtgggattttgagagttatgttgctgtaaataacataactaaaatttggtagagcaaggactatgaataatggaaggccacttaccatttgatagctctgaaaaacacatcttataaaaaattctggccaaaatcaaactgagtgttttggatgagggaacagaagttgagatagagaaaataacatctttcctttggtcagcgaaattttctataaaaattaatagtcacttttctgcatagtcctggaggttagaaaaagatcaactgaacaaagtagtgggaagctgttaaaagaggattgtttccctccgaatgatgatggtatacttttgtacgcatggtacaggattctttgttatgagtgtttgggaaaattgtatgtatgtatgtatgtatgtgatgactggggacttatcctatccattactgttccttgaagtactattatcctactttttaaaaggacgaagtctctaaaaaaaaaatgaaacaatcacaatatgttggggtagtgagttggcatagcaagtaagagaaggataggacacaatgggaggtgcagggctgccagtcatattgaagctgatatctagcccataatggtgagagttgctcaaactctggtcaaaaaggatgtaagtgttatatctatttactgcaagtccagcttgaggccttctattcactatgtaccattttcttttttatcttcactccctccccagctcttaggcaacgtgatattgattgttttggcaacccacttcagcgaggattttaccctacagatacaggcttcttggcagtaactaacaaatgctgtggttaatgctgtagcccacaagaccactgagttccctgtccactatgtttgtacctatgtcccaaaatctcatctcctttagatgggggaggttggggagaagagcagtatcctgcctgctgattcagttcctgcatgataaaaatagaataaagaaatatgctctctaagaaatatcattgtactctttttctgtctttatattttaccctgattcagccaaaaggacgcactatttctgatggaaatgagaatgttggagaatgggagtttaaggacagagaagatactttcttgcaatcctgcaagaaaagagagaactcgtgggtggatttagtggggtagttactcctaggaaggggaaatcgtctctagaataagacaatgtttttacagaaagggaggtcaatggaggtactctttggaggtgtaagaggattgttggtagtgtgtagaggtatgttaggactcaaattagaagttctgtataggctattatttgtatgaaactcaggatatagctcatttggtgactgcagttcacttctacttattttaaacaacatattttttatgatttataatgaagtggggatggggcttcctagagaccaatcaagggccaaaccttgaactttctcttaacgtcttcaatggtattaatagagaattatctctaaggcatgtgaactggctgtcttggttttcatctgtacttcatctgctacctctgtgacctgaaacatatttataattccattaagctgtgcatatgatagatttatcatatgtattttccttaaaggatttttgtaagaactaattgaattgatacctgtaaagtctttatcacactacccaataaataataaatctctttgttcagctctctgtttctataaatatgtacaagttttattgtttttagtggtagtgattttattctctttctatatatatacacacacatgtgtgcattcataaatatatacaatttttatgaataaaaaattattagcaatcaatattgaaaaccactgatttttgtttatgtgagcaaacagcagattaaaaggctgagatttaggaaacagcacgttaagtcaagttgatagaggagaatatggacatttaaaagaggcaggatgatataaaattagggaaactggatgcagagaccagatgaagtaagaaaaatagctatcgttttgagcaaaaatcactgaagtttcttgcatatgagagtgacataataaatagggaaacgtagaaaattgattcacatgtatatatatatatagaactgattagacaaagtctaacttgggtatagtcagaggagcttgctgtaattatattgaggtgatggataaagaactgaagttgatggaaacaatgaagttaagaaaaaaaatcgagtaagagaccattgtggcagtgattgcacagaactggaaaacattgtgaaacagagagtcagagatgacagctaaaatccctgtctgtgaatgaaaagaaggaaatttattgacagaacagcaaatgcctacaagccccctgtttggatctggcaatgaacgtagccattctgtggcaatcacttcaaactcctgtacccaagacccttaggaagtatgtagcaccctcaaacctaaaacctcaaagaaagaggttttagaagatataataccctttcttctccagtttcattaatcccaaaacctctttctcaaagtatttcctctatgtgtccaccccaaagagctcacctcaccatatctcttgagtgggagcacatagataggcggtgctaccatctaacagcttctgaaattcctttgtcatatttttgagtccccactaataacccacaaagcagaataaataccagttgctcatgtacaataatcactcaactgctgtcttgtagcatacattaattaagcacattctttgaataattactgtgtccaaacaatcacactttaaaatctcacacttgtgctatcccttgcccttctgaatgtcactctgtattttaaatgaagagatgagggttgaatttcctgtgttacttattgttcatttctcgatgaggagttttcacattcacctttactggaaaacacataagtacacatcttacaggaaaaatataccaaactgacatgtagcatgaatgcttgtgcatgtagtcatataaaatcttgtagcaatgtaaacattctctgatatacacatacagatgtgtctatatgtctacacaatttcttatgctccatgaacaaacattccatgcacacataagaacacacactgttacagatgcatacttgagtgcattgacaaaattaccccagtcaatctagagaatttggatttctgcatttgactctgttagctttgtacatgctgttcatttactctgggtgatgtctttccctcattttgccttgtctatcttgtactcatactttaagtcctaacttatatgttatctcaactaagaagctatttttttttaattttaactgggcttaaagccctgtctataaactctgctacaattatgggctctttcttataatatttagtgtttttcctactaatgtacttaatctgctcattgtatattcctaccactaaattttaacctcttttatggtagagacattgtcttgtaaactcttatttccctagtatttggagatgaaaaaaaagattaaattatccaaaattagatctctcttttctacattatgagtattacactatccatagggaagtttgtttgagacctaaactgaggaacctttggttctaaaatgactatgtgatatcttagtatttataggtcatgaggttccttcctctgcctctgctatagtttgattagtcagcaagcatgtgtcatgcatttattcacatcagaatttcatacactaataagacatagtatcagaagtcagtttattagttatatcagttagggtccatcaaggaaaggacaaaccattatcagttactcaacctagaattaaatacagctcttaatagttaattatccttgtattggaagagctaaaatatcaaataaaggacagtgcagaaatctagatgttagtaacatcagaaaacctcttccgccattaggcctagaagggcagaaggagaaaatgtttataccaccagagtccagaaccagagcccataaccagaggtccactggattcagtgagctagtgggtgctccttggagagagccagaactgtctaatgggggcatcaaagtatcagccataaaaaaccataaaaaagactgtctgctgtaggagatccgttcagagagagagagagaccagaaataatcttgcttatgctttccctcagccagtgtttaccattgcagaatgtacatgcgactgaaagggtgaggaaacctgggaaatgtcagttcctcaaatacagagaacactgagggaaggatgagaaataaatgtgaaagcagacatgaatggtaattgacagaaggaaactaggatgtgtccagtaaatgaataattacagtgtgcagtgattattgcaatgattaatgtattgataagataatatgaaaacacagaattcaaacagcagtgaactgagattagaattgtggagagcactggcatttaagaatgtcacacttagaatgtgtctctaggcattgttctgtgcatatatcatctcaatattcattatctgaaaattatgaattaggtacaaagctcaaataatttattttttcaggttagcaagaactttttttttttttttttctgagatggagcattgctatggttgcccaggctggagtgcaatggcatgatccaggctcactgcaacatctgcctcccaggttcaagcgattctcctgcctcagcctcccaagtagctggcattacaggcatgtgccaccaccatgcctggctaattttctatttttagtagatagggggtttcaccatgttggtcaggctgatctcgaactcctaacatcaggtgatccaccctcctcggcctctgaatgtactgggatcacaggcgtgagccaccacacccagccaagaatgtgaattttgtagaaggatataacccatatttctctgaccctagagtccttagtatacctcccataccatgtggctcatcctccttacatacatttcccatctttcaccctaccttttcctttttgtttcagcttttcactgtgtgtcaaaatctagaaccttatctcctacctgctctgaaaccaacagcaagttgacttccattctaacccacattggcattacactaattaaaatcgatactgagttctaaaatcatctgggattttggggactatgtcttacttcatacttccttgagatttcacattaaatgttggtgttcattaaaggtccttcatttaactttgtattcatcacactcttggattcacagttatatctaaactcttatatatagcctgtataatcccaattcccaagtctgatttctaacctctgacctccaacctcagtgccaaacccatatatcaaacaatgtactgggcttatttatatagatgtcctataggcacctcagactcagcatgggtatttcacttgttatactaaaactgtttctcttccagtgttttccattttagtcattagatagctacttgcccattcaccaaggtcacagattaaaatcatttccctacctctaatcaacagttcaattctgcttcaatttgtccctatctattaatcaccactcttactgcccagtcaggtcctcattgtttcctgaacaagagtagatgctattctttccactttaagaccttatcctggctggatgcggtggctcaggcttgtaaacccagcactttgggaggccgaggcaggcagatcacttgaggtcaggagttcaagaccagcctgaccaacatggtgaaaccccatctctactaaaaatacaaaatcagccgggcgtgtggtgcatgcctgcagtcccagctattcaggtggctgaggcaggagaattgcttgaacccaggaggcggaggttgcggtgagcctagattgcaccattgcactctagcttgggcaatagggatgaaactccatctcagaagagaaaagaaaaaaagaccttattctgttacacaaatcctctcaatgcaatccatatagaataaacatgtaaccagatctcccaatgtgtaaaatcatttcaggtagaacagaattaaagtgaaaagccaagtctttggaattaacagacaaagttcaaataacagtcctcatggccttaagaatttacctaacattttttttagaatcaattttcttatatatgaattggaaacataattcctccctcacaaacacattctaagattttaaggagatattgatgaagtacatcatctgtcatttttaacagttagtggtagtgattcacacagcacattatgatctgttcttgtatgttctgttccattctgtattcttgacctggttgtattctttctgagctccagatccacatatctaagtacatctttttgcattttacaagagtgcatacaatacaatgtatccaagactgtatttctgattttatcgtaccactaaactcacaaatgtggccctattcttgtgttcacgactgacatcaccgtcatggtccaagtctgataatagaaatggcattgtcactttcttccctactgcaacagaagcccagctatttgtctcccattttctctacttctaaaatacatttcttcactaagtgagaataatcttttaaagacacaaatcaaaccatgccaccacctttcttgaattattcaatatctttcgttggcttccaggttacagaaaaataacttgtaacaaagtttaaaggtcattcatggctcctctctaccctattttataacatttccccttgtgatcagaatctcaggcacatcatccatctttctatatacaaataaagtcatatagtttgaactcacctctggttacttttaatcaaccaaatgctgtaaaatgcatttgtatcgctacgtgttaagcagtagttgattcttttcatttcttgttaatattctattctttgactataccgtaatttatcaattctactgttggtaagcatttaagtggctaccggtttgaggtttttatgattattgctgtcataagcatttctatacatgtctttggatacacacatgcatgtgtttctgaatatctaaaaatgtaattgctaggtaatagacttatcaagcatccagcatttgtggatactattaaaggttttccaaaggggttatactattgtacagtgtcaccaacagagtttgagtttctattgatccatatcaccaccaaaatttgaactgtcagtcttatctcttctcttgtctcttttttcctcttttttttccttcccttcccctctcttcgtttcttttctctcctcttctcttctttcctctcttcccttccctttctctttctcttccctatcccttctcctctcctctcccctccttttttctcctctcctctccattatttatttttccttcttctcctccatcccttccatcctctctcttcccctcttccttccttcctttctccatttcttcctcctctttccctcaatccttccttttggatatgctcatgggtgtgtatttgtctgccattgtggcattatttgaattcagaaaagagtgaaaaactactgggatcttcattctgggtctaattccacatttttttttaagaacacactctgtaaaaatgttctgtactagcatattcccaggaacttcgttaaatttaatctggctgaatatggtaaatctactttgcactttgcattctttctttagtcataccataattttaaacattcaaaatatttgtatataatatttgattttatctgtcattaaaatgttaaccttaaaattcatgtttccagaacctatttcaataactggtaaataaacactattcattttttaaatattcttttaatggatatttatttcaatataataaaaaattagagttttattataggaagaatttaccaaaagaaggaggaagcaagcaagtttaaactgcagcaatagttgtccattccaacctctcaaaattcccttggagacaaaatctctagaggcaaagaagaactttatattgagtcaacttgttaaaacatctgcttttagataagttttcttagtataaagtgacagaaacaaataagttaaactctaagatacattccactatattagcctaaaacacttctgcaaaaatgaaactaggaggatatttttagaaacaactgctgaaagagatgcggtggggagatatgcagaggagaacagggtttctgagtcaagacacacatgacagaacagccaatctcagggcaagttaagggaatagtggaatgaaggttcatttttcattctcacaaactaatgaaaccctgcttatcttaaaccaacctgctcactggagcagggaggacaggaccagcataaaaggcagggcagagtcgactgttgcttacactttcttctgacataacagtgttcactagcaacctcaaacagacaccatggtgcatctgactcctgaggagaagactgctgtcaatgccctgtggggcaaagtgaacgtggatgcagttggtggtgaggccctgggcaggttggtatcaaggttataagagaggctcaaggaggcaaatggaaactgggcatgtgtagacagagaagactcttgggtttctgataggcactgactctctgtcccttgggctgttttcctaccctcagattactggtggtctacccttggacccagaggttctttgagtcctttggggatctgtcctctcctgatgctgttatgggcaaccctaaggtgaaggctcatggcaagaaggtgctaggtgcctttagtgatggcctggctcacctggacaacctcaagggcactttttctcagctgagtgagctgcactgtgacaagctgcacgtggatcctgagaacttcagggtgagtccaggagatgcttcacttttctctttttactttctaatcttacattttggttcttttacctacctgctcttctcccacatttttgtcattttactatattttatcatttaatgcttctaaaattttgttaattttttatttaaatattctgcattttttccttcctcacaatcttgctattttaaattatttaatatcctgtctttctctcccaaccccctcccttcatttttccttctctaacaacaactcaaattatgcataccagctctcacctgctaattctgcacttagaataatccttttgtctctccacatgggtatgggagaggctccaactcaaagatgagaggcatagaatactgttttagaggctataaatcattttacaataaggaataattggaattttataaattctgtagtaaatggaatggaaaggaaagtgaatatttgattatgaaagactaggcagttacactggaggtggggcagaagtcgttgctaggagacagcccatcatcacactgattaatcaattaatttgtatctattaatctgtttatagtaattaatttgtatatgctatatacacatacaaaattaaaactaatttggaattaatttgtatatagtattatacagcatatatagcatatatgtacatatatagactacatgctagttaagtacatagaggatgtgtgtgtatagatatatgttatatgtatgcattcatatatgtacttatttatgctgatgggaataacctggggatcagttttgtctaagatttgggcagaaaaaaatgggtgttggctcagtttctcagaagccagtctttatttctctgttaaccatatgcatgtatctgcctacctcttctccgcagctcttgggcaatgtgctggtgtgtgtgctggcccgcaactttggcaaggaattcaccccacaaatgcaggctgcctatcagaaggtggtggctggtgtggctaatgccctggctcacaagtaccattgagatcctggactgtttcctgataaccataagaagaccctatttccctagattctattttctgaacttgggaacacaatgcctacttcaagggtatggcttctgcctaataaagaatgttcagctcaacttcctgattaatttcacttatttcatttttttgtccaggtgtgtaagaaggttcctgaggctctacagatagggagcacttgtttattttacaaagagtacatgggaaaagagaaaagcaagggaaccgtacaaggcattaatgggtgacacttctacctccaaagagcagaaattatcaagaactcttgatacaaagataatactggcactgcagaggttctagggaagacctcaaccctaagacatagcctcaagggtaatagctacgattaaactccaacaattactgagaaaataatgtgctcaattaaaggcataatgattactcaagacaatgttatgttgtctttcttcctccttcctttgcctgcacattgtagcccataatactataccccatcaagtgttcctgctccaagaaatagcttcctcctcttacttgccccagaacatctctgtaaagaatttcctcttatcttcccatatttcagtcaagattcattgctcacgtattacttgtgacctctcttgaccccagccacaataaacttctctatactacccaaaaaatctttccaaaccctccccgacaccatatttttatatttttcttatttatttcatgcacacacacacactccgtgctttataagcaattctgcctattctctaccttcttacaatgcctactgtgcctcatattaaattcatcaatgggcagaaagaaaatatttattcaagaaaacagtgaatgaatgaacgaatgagtaaatgagtaaatgaaggaatgattattccttgctttagaacttctggaattagaggacaatattaataataccatcgcacagtgtttctttgttgttaatgctacaacatacaaagaggaagcatgcagtaaacaaccgaacagttatttcctttctgatcataggagtaatatttttttccttgagcacatttttgccataggtaaaattagaaggatttttagaactttctcagttgtatacatttttaaaaatctgtattatatgcatgttgattaattttaaacttacttgaatacctaaacagaatctgttgtttccttgtgtttgaaagtgctttcacagtaactctgtctgtactgccagaatatactgacaatgtgttatagttaactgttttgatcacaacattttgaattgactggcagcagaagctctttttatatccatgtgttttccttaagtcattatacatagtaggcatgagactctttatactgaataagatatttaggaaccactggtttacatatcagaagcagagctactcagggcattttggggaagatcactttcacattcctgagcatagggaagttctcataagagtaagatattaaaaggagatacttgtgtggtattcgaaagacagtaagagagattgtagaccttatgatcttgatagggaaaacaaactacattcctttctccaaaagtcaaaaaaaaagagcaaatatagcttactataccttctattcctacaccattagaagtagtcagtgagtctaggcaagatgttggccctaaaaatccaaataccagagaattcatgagaacatcacctggatgggacatgtgccgagcaacacaattactatatgctaggcattgctatcttcatattgaagatgaggaggtcaagagatgaaaaaagacttggcaccttgttgttatattaaaattatttgttagagtagagcttttgtaagagtctaggagtgtgggagctaaatgatgatacacatggacacaaagaatagatcaacagacacccaggcctacttgagggttgagggtgggaagagggagacgatgaaaaagaacctattgggtattaagttcatcactgagtgatgaaataatctgtacatcaagacccagtgatatgcaatttacctatataacttgtacatgtacccccaaatttaaaataaagttaaaacaaagtataggaatggaattaattcctcaagatttggctttaattttatttgataatttatcaaatggttgtttttcttttctcactatggcgttgctttataaactatgttcagtatgtctgaatgaaagggtgtgtgtgtgtgtgaaagagagggagagaggaagggaagagaggacgtaataatgtgaatttgagttcatgaaaatttttcaataaaataatttaatgtcaggagaattaagcctaatagtctcctaaatcatccatctcttgagcttcagagcagtcctctgaattaatgcctacatgtttgtaaagggtgttcagactgaagccaagattctacctctaaagagatgcaatctcaaatttatctgaagactgtacctctgctctccataaattgacaccatggcccacttaatgaggttaaaaaaaagctaattctgaatgaaaatctgagcccagtggaggaaatattaatgaacaaggtgcagactgaaatataaattttctgtaataattatgcatatactttagcaaagttctgtctatgttgactttattgcttttggtaagaaatacaactttttaaagtgaactaaactatcctatttccaaactattttgtgtgtgtgcggtttgtttctatgggttctggttttcttggagcatttttatttcattttaattaattaattctgagagctgctgagttgtgtttactgagagattgtgtatctgcgagagaagtctgtagcaagtagctagactgtgcttgacctaggaacatatacagtagattgctaaaatgtctcacttggggaattttagactaaacagtagagcatgtataaaaatactctagtcaagtgctgcttttgaaacaaatgataaaaccacactcccatagatgagtgtcatgattttcatggaggaagttaatattcatcctctaagtatacccagactagggccattctgatataaaacattaggacttaagaaagattaatagactggagtaaaggaaatggacctctgtctctctcgctgtctcttttttgaggacttgtgtgtgtgtgtgtgtgtgtgtgtgtgtgtgttgtggtcagtggggctggaataaaagtagaatagacctgcacctgctgtggcatccattcacagagtagaagcaagctcacaatagtgaagatgtcagtaagcttgaatagtttttcaggaactttgaatgctgatttagatttgaaactgaggctctgaccataaccaaatttgcactatttattgcttcttgaaacttatttgcctggtatgcctgggcttttgatggtcttagtatagcttgcagccttgtccctgcagggtattatgggtaatagaaagaaaagtctgcgttacactctagtcacactaagtaactaccattggaaaagcaacccctgccttgaagccaggatgatggtatctgcagcagttgccaacacaagagaaggatccatagttcatcatttaaaaaagaaaacaaaatagaaaaaggaaaactatttctgagcataagaagttgtagggtaagtctttaagaaggtgacaatttctgccaatcaggatttcaaagctcttgctttgacaattttggtctttcagaatactataaatataacctatattataatttcataaagtctgtgcattttctttgacccaggatatttgcaaaagacatattcaaacttccgcagaacactttatttcacatatacatgcctcttatatcagggatgtgaaacagggtcttgaaaactgtctaaatctaaaacaatgctaatgcaggtttaaatttaataaaataaaatccaaaatctaacagccaagtcaaatctgtatgttttaacatttaaaatattttaaagacgtcttttcccaggattcaacatgtgaaatcttttctcagggatacacgtgtgcctagatcctcattgctttagttttttacagaggaatgaatataaaaagaaaatacttaaattttatccctcttacctctataatcatacataggcataattttttaacctaggctccagatagccatagaagaaccaaacactttctgcgtgtgtgagaataatcagagtgagattttttcacaagtacctgatgagggttgagacaggtagaaaaagtgagagatctctatttatttagcaataatagagaaagcatttaagagaataaagcaatggaaataagaaatttgtaaatttccttctgataactagaaatagaggatccagtttcttttggttaacctaaattttatttcattttattgttttattttattttattttattttattttgtgtaatcgtagtttcagagtgttagagctgaaaggaagaagtaggagaaacatgcaaagtaaaagtataacactttccttactaaaccgactgggtttccaggtaggggcaggattcaggatgactgacagggcccttagggaacactgagaccctacgctgacctcataaatgcttgctacctttgctgttttaattacatcttttaatagcaggaagcagaactctgcacttcaaaagtttttcctcacctgaggagttaatttagtacaaggggaaaaagtacagggggatgggagaaaggcgatcacgttgggaagctatagagaaagaagagtaaattttagtaaaggaggtttaaacaaacaaaatataaagagaaataggaacttgaatcaaggaaatgattttaaaacgcagtattcttagtggactagaggaaaaaaataatctgagccaagtagaagaccttttcccctcctacccctactttctaagtcacagaggctttttgttcccccagacactcttgcagattagtccaggcagaaacagttagatgtccccagttaacctcctatttgacaccactgattaccccattgatagtcacactttgggttgtaagtgactttttatttatttgtatttttgactgcattaagaggtctctagttttttatctcttgtttcccaaaacctaataagtaactaatgcacagagcacattgatttgtatttattctatttttagacataatttattagcatgcatgagcaaattaagaaaaacaacaacaaatgaatgcatatatatgtatatgtatgtgtgtatatatacacatatatatatatattttttttcttttcttaccagaaggttttaatccaaataaggagaagatatgcttagaactgaggtagagttttcatccattctgtcctgtaagtattttgcatattctggagacgcaggaagagatccatctacatatcccaaagctgaattatggtagacaaagctcttccacttttagtgcatcaatttcttatttgtgtaataagaaaattgggaaaacgatcttcaatatgcttaccaagctgtgattccaaatattacgtaaatacacttgcaaaggaggatgtttttagtagcaatttgtactgatggtatggggccaagagatatatcttagagggagggctgagggtttgaagtccaactcctaagccagtgccagaagagccaaggacaggtacggctgtcatcacttagacctcaccctgtggagccacaccctagggttggccaatctactcccaggagcagggagggcaggagccagggctgggcataaaagtcagggcagagccatctattgcttacatttgcttctgacacaactgtgttcactagcaacctcaaacagacaccatggtgcacctgactcctgaggagaagtctgccgttactgccctgtggggcaaggtgaacgtggatgaagttggtggtgaggccctgggcaggttggtatcaaggttacaagacaggtttaaggagaccaatagaaactgggcatgtggagacagagaagactcttgggtttctgataggcactgactctctctgcctattggtctattttcccacccttaggctgctggtggtctacccttggacccagaggttctttgagtcctttggggatctgtccactcctgatgctgttatgggcaaccctaaggtgaaggctcatggcaagaaagtgctcggtgcctttagtgatggcctggctcacctggacaacctcaagggcacctttgccacactgagtgagctgcactgtgacaagctgcacgtggatcctgagaacttcagggtgagtctatgggacccttgatgttttctttccccttcttttctatggttaagttcatgtcataggaaggggagaagtaacagggtacagtttagaatgggaaacagacgaatgattgcatcagtgtggaagtctcaggatcgttttagtttcttttatttgctgttcataacaattgttttcttttgtttaattcttgctttctttttttttcttctccgcaatttttactattatacttaatgccttaacattgtgtataacaaaaggaaatatctctgagatacattaagtaacttaaaaaaaaactttacacagtctgcctagtacattactatttggaatatatgtgtgcttatttgcatattcataatctccctactttattttcttttatttttaattgatacataatcattatacatatttatgggttaaagtgtaatgttttaatatgtgtacacatattgaccaaatcagggtaattttgcatttgtaattttaaaaaatgctttcttcttttaatatacttttttgtttatcttatttctaatactttccctaatctctttctttcagggcaataatgatacaatgtatcatgcctctttgcaccattctaaagaataacagtgataatttctgggttaaggcaatagcaatatttctgcatataaatatttctgcatataaattgtaactgatgtaagaggtttcatattgctaatagcagctacaatccagctaccattctgcttttattttatggttgggataaggctggattattctgagtccaagctaggcccttttgctaatcatgttcatacctcttatcttcctcccacagctcctgggcaacgtgctggtctgtgtgctggcccatcactttggcaaagaattcaccccaccagtgcaggctgcctatcagaaagtggtggctggtgtggctaatgccctggcccacaagtatcactaagctcgctttcttgctgtccaatttctattaaaggttcctttgttccctaagtccaactactaaactgggggatattatgaagggccttgagcatctggattctgcctaataaaaaacatttattttcattgcaatgatgtatttaaattatttctgaatattttactaaaaagggaatgtgggaggtcagtgcatttaaaacataaagaaatgaagagctagttcaaaccttgggaaaatacactatatcttaaactccatgaaagaaggtgaggctgcaaacagctaatgcacattggcaacagccctgatgcctatgccttattcatccctcagaaaaggattcaagtagaggcttgatttggaggttaaagttttgctatgctgtattttacattacttattgttttagctgtcctcatgaatgtcttttcactacccatttgcttatcctgcatctctcagccttgactccactcagttctcttgcttagagataccacctttcccctgaagtgttccttccatgttttacggcgagatggtttctcctcgcctggccactcagccttagttgtctctgttgtcttatagaggtctacttgaagaaggaaaaacagggggcatggtttgactgtcctgtgagcccttcttccctgcctcccccactcacagtgacccggaatctgcagtgctagtctcccggaactatcactctttcacagtctgctttggaaggactgggcttagtatgaaaagttaggactgagaagaatttgaaagggggctttttgtagcttgatattcactactgtcttattaccctatcataggcccaccccaaatggaagtcccattcttcctcaggatgtttaagattagcattcaggaagagatcagaggtctgctggctcccttatcatgtcccttatggtgcttctggctctgcagttattagcatagtgttaccatcaaccaccttaacttcatttttcttattcaatacctaggtaggtagatgctagattctggaaataaaatatgagtctcaagtggtccttgtcctctctcccagtcaaattctgaatctagttggcaagattctgaaatcaaggcatataatcagtaataagtgatgatagaagggtatatagaagaattttattatatgagagggtgaaacctaaaatgaaatgaaatcagacccttgtcttacaccataaacaaaaataaatttgaatgggttaaagaattaaactaagacctaaaaccataaaaatttttaaagaaatcaaaagaagaaaattctaatattcatgttgcagccgttttttgaatttgatatgagaagcaaaggcaacaaaaggaaaaataaagaagtgaggctacatcaaactaaaaaatttccacacaaaaaagaaaacaatgaacaaatgaaaggtgaaccatgaaatggcatatttgcaaaccaaatatttcttaaatattttggttaatatccaaaatatataagaaacacagatgattcaataacaaacaaaaaattaaaaataggaaaataaaaaaattaaaaagaagaaaatcctgccatttatgcgagaattgatgaacctggaggatgtaaaactaagaaaaataagcctgacacaaaaagacaaatactacacaaccttgctcatatgtgaaacataaaaaagtcactctcatggaaacagacagtagaggtatggtttccaggggttgggggtgggagaatcaggaaactattactcaaagggtataaaatttcagttatgtgggatgaataaattctagatatctaatgtacagcatcgtgactgtagttaattgtactgtaagtatatttaaaatttgcaaagagagtagatttttttgtttttttagatggagttttgctcttgttgtccaggctggagtgcaatggcaagatcttggctcactgcaacctccgcctcctgggttcaagcaaatctcctgcctcagcctcccgagtagctgggattacaggcatgcgacaccatgcccagctaattttgtatttttagtagagacggggtttctccatgttggtcaggctgatccgcctcctcggccaccaaagggctgggattacaggcgtgaccaccgggcctggccgagagtagatcttaaaagcatttaccacaagaaaaaggtaactatgtgagataatgggtatgttaattagcttgattgtggtaatcatttcacaaggtatacatatattaaaacatcatgttgtacaccttaaatatatacaatttttatttgtgaatgatacctcaataaagttgaagaataataaaaaagaatagacatcacatgaattaaaaaactaaaaaataaaaaaatgcatcttgatgattagaattgcattcttgatttttcagatacaaatatccatttgactgtttactcttttccaaaacaatacaataaattttagcactttatcttcattttccccttcccaatctataattttatatatatatattttagatattttgtatagttttactccctagattttctagtgttattattaaatagtgaagaaatgtttacacttatgtacaaaatgttttgcatgcttttcttcatttctaacattctctctaagtttattctattttttcctgattatccttaatattatctctttctgctggaaatatattgttacttttggtttatctaaaaatggcttcattttcttcattctaaaatcatgttaaattaataccactcatgtgtaagtaagatagtggaataaatagaaatccaaaaactaaatctcacaaaatataataatgtgatatataaaaatatagcttttaaatttagcttggaaataaaaaacaaacagtaattgaacaactatactttttgaaaagagtaaagtgaaatgcttaactgcatataccacaatcgattacacaattaggtgtgaaggtaaaattcagtcacgaaaaaactagaataaaaatatgggaagacatgtatataatcttagagataacagtgttatttaattatcaacccaaagtagaaactatcaagggagaaataaattcagtcaacaataaaagcatttaagaagttattctaggctgggagcggtggctcacacctgcaattgcagcactttgggaggcctagacaggcggatcacgacgtcaggagttcaagatcagcctggccaacatagtgaaacctcatcgctactaaaaatataaaaacttagcctggcgtggtggcaggcatgtgtaatcccagcaatttgggaggctgaggcaggagaatcgcttgatcctgggaggcagaggttgcagtgagccaagattgtgccactgcattccagcccaggtgacagcatgagactccgtcacaaaaaaaaaagaaaaaaaaggggggggggggcggtggagccaagatgaccgaataggaacagctccagtctatagctcccatcgtgagtgacgcagaagacgggtgatttctgcatttccaactgaggtaccaggttcatctcacagggaagtgccaggcagtgggtgcaggacagtagtgcagtgcactgtgcatgagccgaagcagggcgaggcatcacctcacccgggaagcacaaggggtcagggaattccctttcctagtcaaagaaaagggtgacagatggcacctggaaaatcgggtcactcccgccctaatactgcgctcttccaacaagcttaacaaatggcacaccaggagattatatcccatgcctggctcagagggtcctacgcccatggagcctcgctcattgctagcacagcagtctgaggtcaaactgcaaggtggcagtgaggctgggggaggggtgcccaccattgtccaggcttgagcaggtaaacaaagccgcctggaagctcgaactgggtggagcccaccacagctcaaggaggcctgcctgcctctgtaggctccacctctaggggcagggcacagacaaacaaaagacaacaagaacctctgcagacttaaatgtccctgtctgacagctttgaagagagtagtggttctcccagcacatagcttcagatctgagaacaggcagactgcctcctcaagtgggtccctgacccccgagtagcctaactgggaggcatcccccagtagggcggactgacacctcacatggctggtactcctctaagacaaaacttccagaggaatgatcaggcagcagcatttgcggttcaccaatatccactgttctgcagccaccgctgctgatacccaggaaaacagcatctggagtggacctccagtaaactccaacagacctgcagctgagggtcctgactgttagaaggaaaactaacaaacagaaaggacatccacaccaaaaacccatctgtacatcaccatcatcaaagaccaaaggtagataaaaccataaagatggggaaaaagcagagcagaaaaactggacactctaaaaatgagagtgcctctccttctccaaagtaacgcagctcctcaccagcaatggaacaaagctgggcagagaatgactttgacgagttgagagaggaaggcttcagaagatcaaactactccaagctaaaggaggaagttcgaacaaacggcaaagaagtaaaaaactttgaaaaaaaattagatgaatggataactagaataaccaatgcacagaagtccttaaaggacctgatggagctgaaaaccaaggcaggagaactacgtgacaaatacacaagcctcagtaaccgatgagatcaactggaagaaagggtatcaatgacggaagatgaaatgaatgaaatgaagcatgaagagaagtttagagaaaaaagaataaaaagaaacgaacaaagcctccaagaaatatgggactatgtgaaaagaccaaatctacatctaattggtgtagctgaaagtgatggggagaatggaaccaagttggaaaacactctgcaggatattatccaggagaacttccccaatctagcaaggcagcccaaattcacattcaggaaatacagagaacgccacaaagatactcctagagaaaagcaactccaagacacataactgacagattcaccaaagttgaaatgaaggaaaaaatgttaagggcagccagagagaaaggtcgggttacccacaaagggaagcccatcagactaacagctgatctatcggcagaaactctacaagccagaagaaagtgggggccaatattcaacattgttaaagaaaagaattttcggcccagaatttcatatccagccaaactaagcttcataagcattggagaaataaaatcctttacagacaagcaaatgctgagagattttgtcaccaccaggcctgccctacaagagctcctgaaggaagcactaaacatggaaaggaacaactagtatcagccactgcaaaaacatgccaaattgtaaacgaccatcaaggctaggaagaaactgcatcaaggagcaaaataaccagctaacatcataatgacaggatcaaattcatacataacaatactcaccttaaatgtaaataggctaaatgctccaattaaaagacacagactggcaaattggataaggagtcaagacccatctgtcgttatgtattcaggaaacccatctcacgtgcagagacacacataggctcgaaataaaaggatggaggaatatctaccaagcaaatggaaaacaaaaaaaggcaggggttgcaatcctagtctctgataaaacagattttaaaccaacaaagatcaaaagagacaaagaaggccattacataatggcaaagggatctattcaagaagaagaactaactatactaaatatatatgcacccaatacaggagcacccagattcataaaacaagtcctgagtgacctacaaagagacttagatgcccacacaataataatgggagactttaacaccccactgtcaacattagacagatcaacgagacagaaagttaacaaggatatccaggaattggactcagctctgcaccaagcagacctaatagacatctacagaactctccaccccaaatcaacagaatatacattcttttcagcaccacaccacacctattccaaaactgaccacatagttggaagtaaagctctcctcagcaaatgtaaaagaacagaaactataacaaactgtctctcagaccacagtgcaatcaaactagaactcaggattaagaaactcactcaaaaccactcagctacatggaaactgaacagcctgctcctgaatgactactgggtacataacaaaatgaaggcagaaataaagatgttctttgaaacaacgagaacaaagacacaacacaccagaatctctgagacacattcaaagcagtgtgtagagggaaatttatagcactaaatgcccacaagggaaagcaggaaagatctaaaattgacaccctaacatcacaattaaaaaactagagaagcaggagcaaacacattcaaaagctaacagaagacaagaaataactaagatcagagcagaagtgaagaagatagagacacaaaaaacccttcaaaaaaatcaatgaatccagaagctgtttttttgaaaagatcaacaaaattgatagactgctagcaagactaataaagaagaaaggggagaagaatcaaatagacgcaataaaaaatgacacggggtatcaccactgatcccacagaaatacaaactaccgtcagagaatactataaacacctctacgcaaataaactagaaaatctagaagaaatggataaattcctcgacacatacactctgccaagactaaaccaggaagaagttgtatctctgaatagaccaataacaggctctgaaattgaggcaataattaatagcttatcaaccaaaaaaagtccgggaccagtaggattcatagccgaattctaccagaggtacaaggaggagctggtaccattccttctgaaactattccaatcaatagaaaaagagggaatcctccctaactcattttatgaggccagcatcatcctgataccaaagcctgacagagacacaacaaaaaaagagaatgttacaccaatatccttgatgaacatcgatgcaaaaatcctcaataaaatactggcaaactgaatccagcagcacatcaaaaagcttatcctccatgatcaagtgggcttcatccctgccatgcaaggctggttcaacatacgaaatcaataaacataatccagcatataaacagaaccaaagacacaaaccatatgattatctcaatagatgcagaaaaggcctttgacaaaattcaacaatgcttcatgctaaaaactctcaataaattaggtattgatgggacatatctcaaaataataagagctatctatgacaaacccacagccaatatcatactgagtggacaaaaactggaagcattccctttgaaaactggcacaaggcagggatgccctctctcaccactcctattcaacatagtgttggaagttctggccagggcaatcaggcaggagaaggaaataaagggcattcaattaggaaaagaggaaggtgaaattgtccctgtttgcagatgacatgattgtatatctagaaaaccccattgtctcagcccaaaatctccttaagctgataagcaacttcagcaaagtctcaggatataaaatcagtgtgcaaaaatcacaagtattcctatgcaccaataacagacaaacagagagccaaatcatgagtgaactcccattcacaattgcttcaaagagaataaaatacctaggaatccaacttacaagggatgtgaaggacctcttcaaggagaactacaaaccactgctcaatgaaataaaagaggatacaaacaaatggaagaacattccatgcttatgggtaggaagaatcatatcgtgaaaatggtcatactgcccaaggtaatttatagattcaatgccatccccatcaagctaccaatgactttcttcacagaactggaaaaaactactttaaagttcatatggaatcaaaaaagagcccacatcaccaaggcaatcctaagccaaaagaacaaagctggaggcatcacgctacctgacttcaaactatactacaatgctacggtaaccaaaacagcatggtactggtaccaaaacagagatctagaccaatggaacagaacagagccctcagaaataatgccgcatatctacaactatccgatctttgacaaacctgagagaaacaagcaatggggaaaggattccctatttaataaatggtgctgggaaaactggctagccatatgtagaaagctgaaactggatccttccttacaccttatacaaaaattaattcaagatggattaaagacttaaacattagacctaaaaccataaaaaccctagaaaaaaacctaggcaataccattcaggacataggcatgggcaaggacttcatgtctaaaacaccaaaacgaatggcaacaaaagacaaaatggacaaacgggatctaattaaactaaagagcttctgcacagctaaagaaactaccatcagagtgaacaggcaacctacaaaatgggagaaaatttttgcaatctactcatctgacaaagggctaatatccagaatctacaatgaactcaaacaaatttacaagaaaaaacaaacaaccccatcaaaaagtgggcaaaggatatgaacagacacttctcaaaagaagacatttatgtaatcaaaaaacacatgaaaaaatgctcatcatcactagccatcagagaaatgcaaatcaaaaccacaatgagataccatctcacaccagttagaatggcgatcattaaaaagtcaggaaacaacaggtgctggagaggatgtggagaaacaggaacaacttttacactgttggtgggactgtaaactagttcaaccattgcggaagtcagtgtggcaattcctcaggaatctagaactagaaataccatttgacccagccatcccattactgggtagatacccaaaggattataaatcatgctgctataaagacacatgcacacgtatgtttattgcagcactattcacaatagcaaagacttggaaccaacccaaatgtccaacaacgatagattggattaagaaaatgtggcacatatacaccatggaatactatgcagccataaaaaatgatgagttcatgtcctttgtagggacatggatgaagctggaaactatcattctcagcaaactatcacaaggacaataaaccaaacaccgcatgttctcactcataggtgggaattgaacaatgagaacacatggacacatgaagaggaacatcacactctggggactgttatggggtggggggcaggggcagggatagcactaggagatatacctaatgctaaatgacgagttaatgggtgcagcacaccaacatggcacatgtatacatatataacaaacctgccgttgtgcacatgtaccctaaaacttgaagtataataataaaaaaaagttatcctattaaaactgatctcacacatccgtagagccattatcaagtctttctctttgaaacagacagaaatttagtgttttctcagtcagttaac

SEQ ID NO: 94 - protein, 147 aa, Homo sapiens
  REGION 1..147: note = misc_feature - Homo sapiens, UniProt Accession No. P68871
MVHLTPEEKSAVTALWGKVNVDEVGGEALGRLLVVYPWTQRFFESFGDLSTPDAVMGNPKVKAHGKKVLGAFSDGLAHLDNLKGTFATLSELHCDKLHVDPENFRLLGNVLVCVLAHHFGKEFTPPVQAAYQKVVAGVANALAHKYH

SEQ ID NO: 95 - protein, 147 aa, Homo sapiens; identical to SEQ ID NO: 94
  REGION 1..147: note = misc_feature - Homo sapiens, NCBI Accession No. NP_000509

SEQ ID NO: 96 - protein, 374 aa, Aeromonas salmonicida
  REGION 1..374: note = misc_feature - Aeromonas salmonicida, GenBank Accession No. ABD57356.1
MNEQAKQLVAVTRQPALNAGVGLVLAQLAEVEARQIPGSLAEARAHCLAQGAPDILLVEVENPQTLAADLAALAECCPPQMRLVLLGERGDVTLFRWLISVGVDDYYPAPLDPDALRTGLLRLLGVPLVTSLRKGRVICVVGAAGGVGTSTVAANLAMALADQHHRQVALLDLNLHHSRHPILLGSDYAPPGEQWWQATDRLDGTLLAHTAHQLGPRLFLFYDEGQELVLGAEQLVAAVNVMAEHYSTLIIDVPDLRTHGLRALLQEADVVLWLHDFSLGALRLLGQCPQGGQAQRRLLVGNHCRGKEGRVPAQELERVCGQPHAAVLPYDHGVFVRAERAGQPLIQQKSKLARALTLLAGELVGAQVTGRGRR

SEQ ID NO: 97 - protein, 432 aa, synthetic construct
  REGION 1..432: note = Synthetic
  REGION 1..432: note = misc_feature - Synthetic construct, GenBank Accession No. ANW61888.1
MAPKKKRKVMSQFDILCKTPPKVLVRQFVERFERPSGEKIASCAAELTYLCWMITHNGTAIKRATFMSYNTIISNSLSFDIVNKSLQFKYKTQKATILEASLKKLIPAWEFTIIPYNGQKHQSDITDIVSSLQLQFESSEEADKGNSHSKKMLKALLSEGESIWEITEKILNSFEYTSRFTKTKTLYQFLFLATFINCGRFSDIKNVDPKSFKLVQNKYLGVIIQCLVTETKTSVSRHIYFFSARGRIDPLVYLDEFLRNSEPVLKRVNRTGNSSSNKQEYQLLKDNLVRSYNKALKKNAPYPIFAIKNGPKSHIGRHLMTSFLSMKGLTELTNVVGNWSDKRASAVARTTYTHQITAIPDHYFALVSRYYAYDPISKEMIALKDETNPIEEWQHIEQLKGSAEGSIRYPAWNGIISQEVLDYLSSYINRRI

SEQ ID NO: 98 - DNA, 35935 bp, Human adenovirus
  misc_feature 1..35935: note = Human adenovirus 5, GenBank Accession No. M73260
  source 1..35935: mol_type = genomic DNA
catcatcaataatataccttattttggattgaagccaatatgataatgagggggtggagtttgtgacgtggcgcggggcgtgggaacggggcgggtgacgtagtagtgtggcggaagtgtgatgttgcaagtgtggcggaacacatgtaagcgacggatgtggcaaaagtgacgtttttggtgtgcgccggtgtacacaggaagtgacaattttcgcgcggttttaggcggatgttgtagtaaatttgggcgtaaccgagtaagatttggccattttcgcgggaaaactgaataagaggaagtgaaatctgaataattttgtgttactcatagcgcgtaatatttgtctagggccgcggggactttgaccgtttacgtggagactcgcccaggtgtttttctcaggtgttttccgcgttccgggtcaaagttggcgttttattattatagtcagctgacgtgtagtgtatttatacccggtgagttcctcaagaggccactcttgagtgccagcgagtagagttttctcctccgagccgctccgacaccgggactgaaaatgagacatattatctgccacggaggtgttattaccgaagaaatggccgccagtcttttggaccagctgatcgaagaggtactggctgataatcttccacctcctagccattttgaaccacctacccttcacgaactgtatgatttagacgtgacggcccccgaagatcccaacgaggaggcggtttcgcagatttttcccgactctgtaatgttggcggtgcaggaagggattgacttactcacttttccgccggcgcccggttctccggagccgcctcacctttcccggcagcccgagcagccggagcagagagccttgggtccggtttctatgccaaaccttgtaccggaggtgatcgatcttacctgccacgaggctggctttccacccagtgacgacgaggatgaagagggtgaggagtttgtgttagattatgtggagcaccccgggcacggttgcaggtcttgtcattatcaccggaggaatacgggggacccagatattatgtgttcgctttgctatatgaggacctgtggcatgtttgtctacagtaagtgaaaattatgggcagtgggtgatagagtggtgggtttggtgtggtaattttttttttaatttttacagttttgtggtttaaagaattttgtattgtgatttttttaaaaggtcctgtgtctgaacctgagcctgagcccgagccagaaccggagcctgcaagacctacccgccgtcctaaaatggcgcctgctatcctgagacgcccgacatcacctgtgtctagagaatgcaatagtagtacggatagctgtgactccggtccttctaacacacctcctgagatacacccggtggtcccgctgtgccccattaaaccagttgccgtgagagttggtgggcgtcgccaggctgtggaatgtatcgaggacttgcttaacgagcctgggcaacctttggacttgagctgtaaacgccccaggccataaggtgtaaacctgtgattgcgtgtgtggttaacgcctttgtttgctgaatgagttgatgtaagtttaataaagggtgagataatgtttaacttgcatggcgtgttaaatggggcggggcttaaagggtatataatgcgccgtgggctaatcttggttacatctgacctcatggaggcttgggagtgtttggaagatttttctgctgtgcgtaacttgctggaacagagctctaacagtacctcttggttttggaggtttctgtggggctcatcccaggcaaagttagtctgcagaattaaggaggattacaagtgggaatttgaagagcttttgaaatcctgtggtgagctgtttgattctttgaatctgggtcaccaggcgcttttccaagagaaggtcatcaagactttggatttttccacaccggggcgcgctgcggctgctgttgcttttttgagttttataaaggataaatggagcgaagaaacccatctgagcggggggtacctgctggattttctggccatgcatctgtggagagcggttgtgagacacaagaatcgcctgctactgttgtcttccgtccgcccggcgataataccgacggaggagcagcagcagcagcaggaggaagccaggcggcggcggcaggagcagagcccatggaacccgagagccggcctggaccctcgggaatgaatgttgtacaggtggctgaactgtatccagaactgagacgcattttgacaattacagaggatgggcaggggctaaagggggtaaagagggagcggggggcttgtgaggctacagaggaggctaggaatctagcttttagcttaatgaccagacaccgtcctgagtgtattacttttcaacagatcaaggataattgcgctaatgagcttgatctgctggcgcagaagtattccatagagcagctgaccacttactggctgcagccaggggatgattttgaggaggctattagggtatatgcaaaggtggcacttaggccagattgcaagtacaagatcagcaaacttgtaaatatcaggaattgttgctacatttctgggaacggggccgaggtggagatagatacggaggatagggtggcctttagatgtagcatgataaatatgtggccgggggtgcttggcatggacggggtggttattatgaatgtaaggtttactggccccaattttagcggtacggttttcctggccaataccaaccttatcctacacggtgtaagcttctatgggtttaacaatacctgtgtggaagcctggaccgatgtaagggttcggggctgtgccttttactgctgctggaagggggtggtgtgtcgccccaaaagcagggcttcaattaagaaatgcctctttgaaaggtgtaccttgggtatcctgtctgagggtaactccagggtgcgccacaatgtggcctccgactgtggttgcttcatgctagtgaaaagcgtggctgtgattaagcataacatggtatgtggcaactgcgaggacagggcctctcagatgctgacctgctcggacggcaactgtcacctgctgaagaccattcacgtagccagccactctcgcaaggcctggccagtgtttgagcataacatactgacccgctgttccttgcatttgggtaacaggaggggggtgttcctaccttaccaatgcaatttgagtcacactaagatattgcttgagcccgagagcatgtccaaggtgaacctgaacggggtgtttgacatgaccatgaagatctggaaggtgctgaggtacgatgagacccgcaccaggtgcagaccctgcgagtgtggcggtaaacatattaggaaccagcctgtgatgctggatgtgaccgaggagctgaggcccgatcacttggtgctggcctgcacccgcgctgagtttggctctagcgatgaagatacagattgaggtactgaaatgtgtgggcgtggcttaagggtgggaaagaatatataaggtgggggtcttatgtagttttgtatctgttttgcagcagccgccgccgccatgagcaccaactcgtttgatggaagcattgtgagctcatatttgacaacgcgcatgcccccatgggccggggtgcgtcagaatgtgatgggctccagcattgatggtcgccccgtcctgcccgcaaactctactaccttgacctacgagaccgtgtctggaacgccgttggagactgcagcctccgccgccgcttcagccgctgcagccaccgcccgcgggattgtgactgactttgctttcctgagcccgcttgcaagcagtgcagcttcccgttcatccgcccgcgatgacaagttgacggctcttttggcacaattggattctttgacccgggaacttaatgtcgtttctcagcagctgttggatctgcgccagcaggtttctgccctgaaggcttcctcccctcccaatgcggtttaaaacataaataaaaaaccagactctgtttggatttggatcaagcaagtgtcttgctgtctttatttaggggttttgcgcgcgcggtaggcccgggaccagcggtctcggtcgttgagggtcctgtgtattttttccaggacgtggtaaaggtgactctggatgttcagatacatgggcataagcccgtctctggggtggaggtagcaccactgcagagcttcatgctgcggggtggtgttgtagatgatccagtcgtagcaggagcgctgggcgtggtgcctaaaaatgtctttcagtagcaagctgattgccaggggcaggcccttggtgtaagtgtttacaaagcggttaagctgggatgggtgcatacgtggggatatgagatgcatcttggactgtatttttaggttggctatgttcccagccatatccctccggggattcatgttgtgcagaaccaccagcacagtgtatccggtgcacttgggaaatttgtcatgtagcttagaaggaaatgcgtggaagaacttggagacgcccttgtgacctccaagattttccatgcattcgtccataatgatggcaatgggcccacgggcggcggcctgggcgaagatatttctgggatcactaacgtcatagttgtgttccaggatgagatcgtcataggccatttttacaaagcgcgggcggagggtgccagactgcggtataatggttccatccggcccaggggcgtagttaccctcacagatttgcatttcccacgctttgagttcagatggggggatcatgtctacctgcggggcgatgaagaaaacggtttccggggtaggggagatcagctgggaagaaagcaggttcctgagcagctgcgacttaccgcagccggtgggcccgtaaatcacacctattaccgggtgcaactggtagttaagagagctgcagctgccgtcatccctgagcaggggggccacttcgttaagcatgtccctgactcgcatgttttccctgaccaaatccgccagaaggcgctcgccgcccagcgatagcagttcttgcaaggaagcaaagtttttcaacggtttgagaccgtccgccgtaggcatgcttttgagcgtttgaccaagcagttccaggcggtcccacagctcggtcacctgctctacggcatctcgatccagcatatctcctcgtttcgcgggttggggcggctttcgctgtacggcagtagtcggtgctcgtccagacgggccagggtcatgtctttccacgggcgcagggtcctcgtcagcgtagtctgggtcacggtgaaggggtgcgctccgggctgcgcgctggccagggtgcgcttgaggctggtcctgctggtgctgaagcgctgccggtcttcgccctgcgcgtcggccaggtagcatttgaccatggtgtcatagtccagcccctccgcggcgtggcccttggcgcgcagcttgcccttggaggaggcgccgcacgaggggcagtgcagacttttgagggcgtagagcttgggcgcgagaaataccgattccggggagtaggcatccgcgccgcaggccccgcagacggtctcgcattccacgagccaggtgagctctggccgttcggggtcaaaaaccaggtttcccccatgctttttgatgcgtttcttacctctggtttccatgagccggtgtccacgctcggtgacgaaaaggctgtccgtgtccccgtatacagacttgagaggcctgtcctcgagcggtgttccgcggtcctcctcgtatagaaactcggaccactctgagacaaaggctcgcgtccaggccagcacgaaggaggctaagtgggaggggtagcggtcgttgtccactagggggtccactcgctccagggtgtgaagacacatgtcgccctcttcggcatcaaggaaggtgattggtttgtaggtgtaggccacgtgaccgggtgttcctgaaggggggctataaaagggggtgggggcgcgttcgtcctcactctcttccgcatcgctgtctgcgagggccagctgttggggtgagtactccctctgaaaagcgggcatgacttctgcgctaagattgtcagtttccaaaaacgaggaggatttgatattcacctggcccgcggtgatgcctttgagggtggccgcatccatctggtcagaaaagacaatctttttgttgtcaagcttggtggcaaacgacccgtagagggcgttggacagcaacttggcgatggagcgcagggtttggtttttgtcgcgatcggcgcgctccttggccgcgatgtttagctgcacgtattcgcgcgcaacgcaccgccattcgggaaagacggtggtgcgctcgtcgggcaccaggtgcacgcgccaaccgcggttgtgcagggtgacaaggtcaacgctggtggctacctctccgcgtaggcgctcgttggtccagcagaggcggccgcccttgcgcgagcagaatggcggtagggggtctagctgcgtctcgtccggggggtctgcgtccacggtaaagaccccgggcagcaggcgcgcgtcgaagtagtctatcttgcatccttgcaagtctagcgcctgctgccatgcgcgggcggcaagcgcgcgctcgtatgggttgagtgggggaccccatggcatggggtgggtgagcgcggaggcgtacatgccgcaaatgtcgtaaacgtagaggggctctctgagtattccaagatatgtagggtagcatcttccaccgcggatgctggcgcgcacgtaatcgtatagttcgtgcgagggagcgaggaggtcgggaccgaggttgctacgggcgggctgctctgctcggaagactatctgcctgaagatggcatgtgagttggatgatatggttggacgctggaagacgttgaagctggcgtctgtgagacctaccgcgtcacgcacgaaggaggcgtaggagtcgcgcagcttgttgaccagctcggcggtgacctgcacgtctagggcgcagtagtccagggtttccttgatgatgtcatacttatcctgtcccttttttttccacagctcgcggttgaggacaaactcttcgcggtctttccagtactcttggatcggaaacccgtcggcctccgaacggtaagagcctagcatgtagaactggttgacggcctggtaggcgcagcatcccttttctacgggtagcgcgtatgcctgcgcggccttccggagcgaggtgtgggtgagcgcaaaggtgtccctgaccatgactttgaggtactggtatttgaagtcagtgtcgtcgcatccgccctgctcccagagcaaaaagtccgtgcgctttttggaacgcggatttggcagggcgaaggtgacatcgttgaagagtatctttcccgcgcgaggcataaagttgcgtgtgatgcggaagggtcccggcacctcggaacggttgttaattacctgggcggcgagcacgatctcgtcaaagccgttgatgttgtggcccacaatgtaaagttccaagaagcgcgggatgcccttgatggaaggcaattttttaagttcctcgtaggtgagctcttcaggggagctgagcccgtgctctgaaagggcccagtctgcaagatgagggttggaagcgacgaatgagctccacaggtcacgggccattagcatttgcaggtggtcgcgaaaggtcctaaactggcgacctatggccattttttctggggtgatgcagtagaaggtaagcgggtcttgttcccagcggtcccatccaaggttcgcggctaggtctcgcgcggcagtcactagaggctcatctccgccgaacttcatgaccagcatgaagggcacgagctgcttcccaaaggcccccatccaagtataggtctctacatcgtaggtgacaaagagacgctcggtgcgaggatgcgagccgatcgggaagaactggatctcccgccaccaattggaggagtggctattgatgtggtgaaagtagaagtccctgcgacgggccgaacactcgtgctggcttttgtaaaaacgtgcgcagtactggcagcggtgcacgggctgtacatcctgcacgaggttgacctgacgaccgcgcacaaggaagcagagtgggaatttgagcccctcgcctggcgggtttggctggtggtcttctacttcggctgcttgtccttgaccgtctggctgctcgaggggagttacggtggatcggaccaccacgccgcgcgagcccaaagtccagatgtccgcgcgcggcggtcggagcttgatgacaacatcgcgcagatgggagctgtccatggtctggagctcccgcggcgtcaggtcaggcgggagctcctgcaggtttacctcgcatagacgggtcagggcgcgggctagatccaggtgatacctaatttccaggggctggttggtggcggcgtcgatggcttgcaagaggccgcatccccgcggcgcgactacggtaccgcgcggcgggcggtgggccgcgggggtgtccttggatgatgcatctaaaagcggtgacgcgggcgagcccccggaggtagggggggctccggacccgccgggagagggggcaggggcacgtcggcgccgcgcgcgggcaggagctggtgctgcgcgcgtaggttgctggcgaacgcgacgacgcggcggttgatctcctgaatctggcgcctctgcgtgaagacgacgggcccggtgagcttgagcctgaaagagagttcgacagaatcaatttcggtgtcgttgacggcggcctggcgcaaaatctcctgcacgtctcctgagttgtcttgataggcgatctcggccatgaactgctcgatctcttcctcctggagatctccgcgtccggctcgctccacggtggcggcgaggtcgttggaaatgcgggccatgagctgcgagaaggcgttgaggcctccctcgttccagacgcggctgtagaccacgcccccttcggcatcgcgggcgcgcatgaccacctgcgcgagattgagctccacgtgccgggcgaagacggcgtagtttcgcaggcgctgaaagaggtagttgagggtggtggcggtgtgttctgccacgaagaagtacataacccagcgtcgcaacgtggattcgttgatatcccccaaggcctcaaggcgctccatggcctcgtagaagtccacggcgaagttgaaaaactgggagttgcgcgccgacacggttaactcctcctccagaagacggatgagctcggcgacagtgtcgcgcacctcgcgctcaaaggctacaggggcctcttcttcttcttcaatctcctcttccataagggcctccccttcttcttcttctggcggcggtgggggaggggggacacggcggcgacgacggcgcaccgggaggcggtcgacaaagcgctcgatcatctccccgcggcgacggcgcatggtctcggtgacggcgcggccgttctcgcgggggcgcagttggaagacgccgcccgtcatgtcccggttatgggttggcggggggctgccatgcggcagggatacggcgctaacgatgcatctcaacaattgttgtgtaggtactccgccgccgagggacctgagcgagtccgcatcgaccggatcggaaaacctctcgagaaaggcgtctaaccagtcacagtcgcaaggtaggctgagcaccgtggcgggcggcagcgggcggcggtcggggttgtttctggcggaggtgctgctgatgatgtaattaaagtaggcggtcttgagacggcggatggtcgacagaagcaccatgtccttgggtccggcctgctgaatgcgcaggcggtcggccatgccccaggcttcgttttgacatcggcgcaggtctttgtagtagtcttgcatgagcctttctaccggcacttcttcttctccttcctcttgtcctgcatctcttgcatctatcgctgcggcggcggcggagtttggccgtaggtggcgccctcttcctcccatgcgtgtgaccccgaagcccctcatcggctgaagcagggctaggtcggcgacaacgcgctcggctaatatggcctgctgcacctgcgtgagggtagactggaagtcatccatgtccacaaagcggtggtatgcgcccgtgttgatggtgtaagtgcagttggccataacggaccagttaacggtctggtgacccggctgcgagagctcggtgtacctgagacgcgagtaagccctcgagtcaaatacgtagtcgttgcaagtccgcaccaggtactggtatcccaccaaaaagtgcggcggcggctggcggtagaggggccagcgtagggtggccggggctccgggggcgagatcttccaacataaggcgatgatatccgtagatgtacctggacatccaggtgatgccggcggcggtggtggaggcgcgcggaaagtcgcggacgcggttccagatgttgcgcagcggcaaaaagtgctccatggtcgggacgctctggccggtcaggcgcgcgcaatcgttgacgctctagaccgtgcaaaaggagagcctgtaagcgggcactcttccgtggtctggtggataaattcgcaagggtatcatggcggacgaccggggttcgagccccgtatccggccgtccgccgtgatccatgcggttaccgcccgcgtgtcgaacccaggtgtgcgacgtcagacaacgggggagtgctccttttggcttccttccaggcgcggcggctgctgcgctagcttttttggccactggccgcgcgcagcgtaagcggttaggctggaaagcgaaagcattaagtggctcgctccctgtagccggagggttattttccaagggttgagtcgcgggacccccggttcgagtctcggaccggccggactgcggcgaacgggggtttgcctccccgtcatgcaagaccccgcttgcaaattcctccggaaacagggacgagccccttttttgcttttcccagatgcatccggtgctgcggcagatgcgcccccctcctcagcagcggcaagagcaagagcagcggcagacatgcagggcaccctcccctcctcctaccgcgtcaggaggggcgacatccgcggttgacgcggcagcagatggtgattacgaacccccgcggcgccgggcccggcactacctggacttggaggagggcgagggcctggcgcggctaggagcgccctctcctgagcggtacccaagggtgcagctgaagcgtgatacgcgtgaggcgtacgtgccgcggcagaacctgtttcgcgaccgcgagggagaggagcccgaggagatgcgggatcgaaagttccacgcagggcgcgagctgcggcatggcctgaatcgcgagcggttgctgcgcgaggaggactttgagcccgacgcgcgaaccgggattagtcccgcgcgcgcacacgtggcggccgccgacctggtaaccgcatacgagcagacggtgaaccaggagattaactttcaaaaaagctttaacaaccacgtgcgtacgcttgtggcgcgcgaggaggtggctataggactgatgcatctgtgggactttgtaagcgcgctggagcaaaacccaaatagcaagccgctcatggcgcagctgttccttatagtgcagcacagcagggacaacgaggcattcagggatgcgctgctaaacatagtagagcccgagggccgctggctgctcgatttgataaacatcctgcagagcatagtggtgcaggagcgcagcttgagcctggctgacaaggtggccgccatcaactattccatgcttagcctgggcaagttttacgcccgcaagatataccataccccttacgttcccatagacaaggaggtaaagatcgaggggttctacatgcgcatggcgctgaaggtgcttaccttgagcgacgacctgggcgtttatcgcaacgagcgcatccacaaggccgtgagcgtgagccggcggcgcgagctcagcgaccgcgagctgatgcacagcctgcaaagggccctggctggcacgggcagcggcgatagagaggccgagtcctactttgacgcgggcgctgacctgcgctgggccccaagccgacgcgccctggaggcagctggggccggacctgggctggcggtggcacccgcgcgcgctggcaacgtcggcggcgtggaggaatatgacgaggacgatgagtacgagccagaggacggcgagtactaagcggtgatgtttctgatcagatgatgcaagacgcaacggacccggcggtgcgggcggcgctgcagagccagccgtccggccttaactccacggacgactggcgccaggtcatggaccgcatcatgtcgctgactgcgcgcaatcctgacgcgttccggcagcagccgcaggccaaccggctctccgcaattctggaagcggtggtcccggcgcgcgcaaaccccacgcacgagaaggtgctggcgatcgtaaacgcgctggccgaaaacagggccatccggcccgacgaggccggcctggtctacgacgcgctgcttcagcgcgtggctcgttacaacagcggcaacgtgcagaccaacctggaccggctggtgggggatgtgcgcgaggccgtggcgcagcgtgagcgcgcgcagcagcagggcaacctgggctccatggttgcactaaacgccttcctgagtacacagcccgccaacgtgccgcggggacaggaggactacaccaactttgtgagcgcactgcggctaatggtgactgagacaccgcaaagtgaggtgtaccagtctgggccagactattttttccagaccagtagacaaggcctgcagaccgtaaacctgagccaggctttcaaaaacttgcaggggctgtggggggtgcgggctcccacaggcgaccgcgcgaccgtgtctagcttgctgacgcccaactcgcgcctgttgctgctgctaatagcgcccttcacggacagtggcagcgtgtcccgggacacatacctaggtcacttgctgacactgtaccgcgaggccataggtcaggcgcatgtggacgagcatactttccaggagattacaagtgtcagccgcgcgctggggcaggaggacacgggcagcctggaggcaaccctaaactacctgctgaccaaccggcggcagaagatcccctcgttgcacagtttaaacagcgaggaggagcgcattttgcgctacgtgcagcagagcgtgagccttaacctgatgcgcgacggggtaacgcccagcgtggcgctggacatgaccgcgcgcaacatggaaccgggcatgtatgcctcaaaccggccgtttatcaaccgcctaatggactacttgcatcgcgcggccgccgtgaaccccgagtatttcaccaatgccatcttgaacccgcactggctaccgccccctggtttctacaccgggggattcgaggtgcccgagggtaacgatggattcctctgggacgacatagacgacagcgtgttttccccgcaaccgcagaccctgctagagttgcaacagcgcgagcaggcagaggcggcgctgcgaaaggaaagcttccgcaggccaagcagcttgtccgatctaggcgctgcggccccgcggtcagatgctagtagcccatttccaagcttgatagggtctcttaccagcactcgcaccacccgcccgcgcctgctgggcgaggaggagtacctaaacaactcgctgctgcagccgcagcgcgaaaaaaacctgcctccggcatttcccaacaacgggatagagagcctagtggacaagatgagtagatggaagacgtacgcgcaggagcacagggacgtgccaggcccgcgcccgcccacccgtcgtcaaaggcacgaccgtcagcggggtctggtgtgggaggacgatgactcggcagacgacagcagcgtcctggatttgggagggagtggcaacccgtttgcgcaccttcgccccaggctggggagaatgttttaaaaaaaaaaaagcatgatgcaaaataaaaaactcaccaaggccatggcaccgagcgttggttttcttgtattccccttagtatgcggcgcgcggcgatgtatgaggaaggtcctcctccctcctacgagagtgtggtgagcgcggcgccagtggcggcggcgctgggttctcccttcgatgctcccctggacccgccgtttgtgcctccgcggtacctgcggcctaccggggggagaaacagcatccgttactctgagttggcacccctattcgacaccacccgtgtgtacctggtggacaacaagtcaacggatgtggcatccctgaactaccagaacgaccacagcaactttctgaccacggtcattcaaaacaatgactacagcccgggggaggcaagcacacagaccatcaatcttgacgaccggtcgcactggggcggcgacctgaaaaccatcctgcataccaacatgccaaatgtgaacgagttcatgtttaccaataagtttaaggcgcgggtgatggtgtcgcgcttgcctactaaggacaatcaggtggagctgaaatacgagtgggtggagttcacgctgcccgagggcaactactccgagaccatgaccatagaccttatgaacaacgcgatcgtggagcactacttgaaagtgggcagacagaacggggttctggaaagcgacatcggggtaaagtttgacacccgcaacttcagactggggtttgaccccgtcactggtcttgtcatgcctggggtatatacaaacgaagccttccatccagacatcattttgctgccaggatgcggggtggacttcacccacagccgcctgagcaacttgttgggcatccgcaagcggcaacccttccaggagggctttaggatcacctacgatgatctggagggtggtaacattcccgcactgttggatgtggacgcctaccaggcgagcttgaaagatgacaccgaacagggcgggggtggcgcaggcggcagcaacagcagtggcagcggcgcggaagagaactccaacgcggcagccgcggcaatgcagccggtggaggacatgaacgatcatgccattcgcggcgacacctttgccacacgggctgaggagaagcgcgctgaggccgaagcagcggccgaagctgccgcccccgctgcgcaacccgaggtcgagaagcctcagaagaaaccggtgatcaaacccctgacagaggacagcaagaaacgcagttacaacctaataagcaatgacagcaccttcacccagtaccgcagctggtaccttgcatacaactacggcgaccctcagaccggaatccgctcatggaccctgctttgcactcctgacgtaacctgcggctcggagcaggtctactggtcgttgccagacatgatgcaagaccccgtgaccttccgctccacgcgccagatcagcaactttccggtggtgggcgccgagctgttgcccgtgcactccaagagcttctacaacgaccaggccgtctactcccaactcatccgccagtttacctctctgacccacgtgttcaatcgctttcccgagaaccagattttggcgcgcccgccagcccccaccatcaccaccgtcagtgaaaacgttcctgctctcacagatcacgggacgctaccgctgcgcaacagcatcggaggagtccagcgagtgaccattactgacgccagacgccgcacctgcccctacgtttacaaggccctgggcatagtctcgccgcgcgtcctatcgagccgcactttttgagcaagcatgtccatccttatatcgcccagcaataacacaggctggggcctgcgcttcccaagcaagatgtttggcggggccaagaagcgctccgaccaacacccagtgcgcgtgcgcgggcactaccgcgcgccctggggcgcgcacaaacgcggccgcactgggcgcaccaccgtcgatgacgccatcgacgcggtggtggaggaggcgcgcaactacacgcccacgccgccaccagtgtccacagtggacgcggccattcagaccgtggtgcgcggagcccggcgctatgctaaaatgaagagacggcggaggcgcgtagcacgtcgccaccgccgccgacccggcactgccgcccaacgcgcggcggcggccctgcttaaccgcgcacgtcgcaccggccgacgggcggccatgcgggccgctcgaaggctggccgcgggtattgtcactgtgccccccaggtccaggcgacgagcggccgccgcagcagccgcggccattagtgctatgactcagggtcgcaggggcaacgtgtattgggtgcgcgactcggttagcggcctgcgcgtgcccgtgcgcacccgccccccgcgcaactagattgcaagaaaaaactacttagactcgtactgttgtatgtatccagcggcggcggcgcgcaacgaagctatgtccaagcgcaaaatcaaagaagagatgctccaggtcatcgcgccggagatctatggccccccgaagaaggaagagcaggattacaagccccgaaagctaaagcgggtcaaaaagaaaaagaaagatgatgatgatgaacttgacgacgaggtggaactgctgcacgctaccgcgcccaggcgacgggtacagtggaaaggtcgacgcgtaaaacgtgttttgcgacccggcaccaccgtagtctttacgcccggtgagcgctccacccgcacctacaagcgcgtgtatgatgaggtgtacggcgacgaggacctgcttgagcaggccaacgagcgcctcggggagtttgcctacggaaagcggcataaggacatgctggcgttgccgctggacgagggcaacccaacacctagcctaaagcccgtaacactgcagcaggtgctgcccgcgcttgcaccgtccgaagaaaagcgcggcctaaagcgcgagtctggtgacttggcacccaccgtgcagctgatggtacccaagcgccagcgactggaagatgtcttggaaaaaatgaccgtggaacctgggctggagcccgaggtccgcgtgcggccaatcaagcaggtggcgccgggactgggcgtgcagaccgtggacgttcagatacccactaccagtagcaccagtattgccaccgccacagagggcatggagacacaaacgtccccggttgcctcagcggtggcggatgccgcggtgcaggcggtcgctgcggccgcgtccaagacctctacggaggtgcaaacggacccgtggatgtttcgcgtttcagccccccggcgcccgcgcggttcgaggaagtacggcgccgccagcgcgctactgcccgaatatgccctacatccttccattgcgcctacccccggctatcgtggctacacctaccgccccagaagacgagcaactacccgacgccgaaccaccactggaacccgccgccgccgtcgccgtcgccagcccgtgctggccccgatttccgtgcgcagggtggctcgcgaaggaggcaggaccctggtgctgccaacagcgcgctaccaccccagcatcgtttaaaagccggtctttgtggttcttgcagatatggccctcacctgccgcctccgtttcccggtgccgggattccgaggaagaatgcaccgtaggaggggcatggccggccacggcctgacgggcggcatgcgtcgtgcgcaccaccggcggcggcgcgcgtcgcaccgtcgcatgcgcggcggtatcctgcccctccttattccactgatcgccgcggcgattggcgccgtgcccggaattgcatccgtggccttgcaggcgcagagacactgattaaaaacaagttgcatgtggaaaaatcaaaataaaaagtctggactctcacgctcgcttggtcctgtaactattttgtagaatggaagacatcaactttgcgtctctggccccgcgacacggctcgcgcccgttcatgggaaactggcaagatatcggcaccagcaatatgagcggtggcgccttcagctggggctcgctgtggagcggcattaaaaatttcggttccaccgttaagaactatggcagcaaggcctggaacagcagcacaggccagatgctgagggataagttgaaagagcaaaatttccaacaaaaggtggtagatggcctggcctctggcattagcggggtggtggacctggccaaccaggcagtgcaaaataagattaacagtaagcttgatccccgccctcccgtagaggagcctccaccggccgtggagacagtgtctccagaggggcgtggcgaaaagcgtccgcgccccgacagggaagaaactctggtgacgcaaatagacgagcctccctcgtacgaggaggcactaaagcaaggcctgcccaccacccgtcccatcgcgcccatggctaccggagtgctgggccagcacacacccgtaacgctggacctgcctccccccgccgacacccagcagaaacctgtgctgccaggcccgaccgccgttgttgtaacccgtcctagccgcgcgtccctgcgccgcgccgccagcggtccgcgatcgttgcggcccgtagccagtggcaactggcaaagcacactgaacagcatcgtgggtctgggggtgcaatccctgaagcgccgacgatgcttctgaatagctaacgtgtcgtatgtgtgtcatgtatgcgtccatgtcgccgccagaggagctgctgagccgccgcgcgcccgctttccaagatggctaccccttcgatgatgccgcagtggtcttacatgcacatctcgggccaggacgcctcggagtacctgagccccgggctggtgcagtttgcccgcgccaccgagacgtacttcagcctgaataacaagtttagaaaccccacggtggcgcctacgcacgacgtgaccacagaccggtcccagcgtttgacgctgcggttcatccctgtggaccgtgaggatactgcgtactcgtacaaggcgcggttcaccctagctgtgggtgataaccgtgtgctggacatggcttccacgtactttgacatccgcggcgtgctggacaggggccctacttttaagccctactctggcactgcctacaacgccctggctcccaagggtgccccaaatccttgcgaatgggatgaagctgctactgctcttgaaataaacctagaagaagaggacgatgacaacgaagacgaagtagacgagcaagctgagcagcaaaaaactcacgtatttgggcaggcgccttattctggtataaatattacaaaggagggtattcaaataggtgtcgaaggtcaaacacctaaatatgccgataaaacatttcaacctgaacctcaaataggagaatctcagtggtacgaaactgaaattaatcatgcagctgggagagtccttaaaaagactaccccaatgaaaccatgttacggttcatatgcaaaacccacaaatgaaaatggagggcaaggcattcttgtaaagcaacaaaatggaaagctagaaagtcaagtggaaatgcaatttttctcaactactgaggcgaccgcaggcaatggtgataacttgactcctaaagtggtattgtacagtgaagatgtagatatagaaaccccagacactcatatttcttacatgcccactattaaggaaggtaactcacgagaactaatgggccaacaatctatgcccaacaggcctaattacattgcttttagggacaattttattggtctaatgtattacaacagcacgggtaatatgggtgttctggcgggccaagcatcgcagttgaatgctgttgtagatttgcaagacagaaacacagagctttcataccagcttttgcttgattccattggtgatagaaccaggtacttttctatgtggaatcaggctgttgacagctatgatccagatgttagaattattgaaaatcatggaactgaagatgaacttccaaattactgctttccactgggaggtgtgattaatacagagactcttaccaaggtaaaacctaaaacaggtcaggaaaatggatgggaaaaagatgctacagaattttcagataaaaatgaaataagagttggaaataattttgccatggaaatcaatctaaatgccaacctgtggagaaatttcctgtactccaacatagcgctgtatttgcccgacaagctaaagtacagtccttccaacgtaaaaatttctgataacccaaacacctacgactacatgaacaagcgagtggtggctcccgggttagtggactgctacattaaccttggagcacgctggtcccttgactatatggacaacgtcaacccatttaaccaccaccgcaatgctggcctgcgctaccgctcaatgttgctgggcaatggtcgctatgtgcccttccacatccaggtgcctcagaagttctttgccattaaaaacctccttctcctgccgggctcatacacctacgagtggaacttcaggaaggatgttaacatggttctgcagagctccctaggaaatgacctaagggttgacggagccagcattaagtttgatagcatttgcctttacgccaccttcttccccatggcccacaacaccgcctccacgcttgaggccatgcttagaaacgacaccaacgaccagtcctttaacgactatctctccgccgccaacatgctctaccctatacccgccaacgctaccaacgtgcccatatccatcccctcccgcaactgggcggctttccgcggctgggccttcacgcgccttaagactaaggaaaccccatcactgggctcgggctacgacccttattacacctactctggctctataccctacctagatggaaccttttacctcaaccacacctttaagaaggtggccattacctttgactcttctgtcagctggcctggcaatgaccgcctgcttacccccaacgagtttgaaattaagcgctcagttgacggggagggttacaacgttgcccagtgtaacatgaccaaagactggttcctggtacaaatgctagctaactacaacattggctaccagggcttctatatcccagagagctacaaggaccgcatgtactccttctttagaaacttccagcccatgagccgtcaggtggtggatgatactaaatacaaggactaccaacaggtgggcatcctacaccaacacaacaactctggatttgttggctaccttgcccccaccatgcgcgaaggacaggcctaccctgctaacttcccctatccgcttataggcaagaccgcagttgacagcattacccagaaaaagtttctttgcgatcgcaccctttggcgcatcccattctccagtaactttatgtccatgggcgcactcacagacctgggccaaaaccttctctacgccaactccgcccacgcgctagacatgacttttgaggtggatcccatggacgagcccacccttctttatgttttgtttgaagtctttgacgtggtccgtgtgcaccggccgcaccgcggcgtcatcgaaaccgtgtacctgcgcacgcccttctcggccggcaacgccacaacataaagaagcaagcaacatcaacaacagctgccgccatgggctccagtgagcaggaactgaaagccattgtcaaagatcttggttgtgggccatattttttgggcacctatgacaagcgctttccaggctttgtttctccacacaagctcgcctgcgccatagtcaatacggccggtcgcgagactgggggcgtacactggatggcctttgcctggaacccgcactcaaaaacatgctacctctttgagccctttggcttttctgaccagcgactcaagcaggtttaccagtttgagtacgagtcactcctgcgccgtagcgccattgcttcttcccccgaccgctgtataacgctggaaaagtccacccaaagcgtacaggggcccaactcggccgcctgtggactattctgctgcatgtttctccacgcctttgccaactggccccaaactcccatggatcacaaccccaccatgaaccttattaccggggtacccaactccatgctcaacagtccccaggtacagcccaccctgcgtcgcaaccaggaacagctctacagcttcctggagcgccactcgccctacttccgcagccacagtgcgcagattaggagcgccacttctttttgtcacttgaaaaacatgtaaaaataatgtactagagacactttcaataaaggcaaatgcttttatttgtacactctcgggtgattatttacccccacccttgccgtctgcgccgtttaaaaatcaaaggggttctgccgcgcatcgctatgcgccactggcagggacacgttgcgatactggtgtttagtgctccacttaaactcaggcacaaccatccgcggcagctcggtgaagttttcactccacaggctgcgcaccatcaccaacgcgtttagcaggtcgggcgccgatatcttgaagtcgcagttggggcctccgccctgcgcgcgcgagttgcgatacacagggttgcagcactggaacactatcagcgccgggtggtgcacgctggccagcacgctcttgtcggagatcagatccgcgtccaggtcctccgcgttgctcagggcgaacggagtcaactttggtagctgccttcccaaaaagggcgcgtgcccaggctttgagttgcactcgcaccgtagtggcatcaaaaggtgaccgtgcccggtctgggcgttaggatacagcgcctgcataaaagccttgatctgcttaaaagccacctgagcctttgcgccttcagagaagaacatgccgcaagacttgccggaaaactgattggccggacaggccgcgtcgtgcacgcagcaccttgcgtcggtgttggagatctgcaccacatttcggccccaccggttcttcacgatcttggccttgctagactgctccttcagcgcgcgctgcccgttttcgctcgtcacatccatttcaatcacgtgctccttatttatcataatgcttccgtgtagacacttaagctcgccttcgatctcagcgcagcggtgcagccacaacgcgcagcccgtgggctcgtgatgcttgtaggtcacctctgcaaacgactgcaggtacgcctgcaggaatcgccccatcatcgtcacaaaggtcttgttgctggtgaaggtcagctgcaacccgcggtgctcctcgttcagccaggtcttgcatacggccgccagagcttccacttggtcaggcagtagtttgaagttcgcctttagatcgttatccacgtggtacttgtccatcagcgcgcgcgcagcctccatgcccttctcccacgcagacacgatcggcacactcagcgggttcatcaccgtaatttcactttccgcttcgctgggctcttcctcttcctcttgcgtccgcataccacgcgccactgggtcgtcttcattcagccgccgcactgtgcgcttacctcctttgccatgcttgattagcaccggtgggttgctgaaacccaccatttgtagcgccacatcttctctttcttcctcgctgtccacgattacctctggtgatggcgggcgctcgggcttgggagaagggcgcttctttttcttcttgggcgcaatggccaaatccgccgccgaggtcgatggccgcgggctgggtgtgcgcggcaccagcgcgtcttgtgatgagtcttcctcgtcctcggactcgatacgccgcctcatccgcttttttgggggcgcccggggaggcggcggcgacggggacggggacgacacgtcctccatggttgggggacgtcgcgccgcaccgcgtccgcgctcgggggtggtttcgcgctgctcctcttcccgactggccatttccttctcctataggcagaaaaagatcatggagtcagtcgagaagaaggacagcctaaccgccccctctgagttcgccaccaccgcctccaccgatgccgccaacgcgcctaccaccttccccgtcgaggcacccccgcttgaggaggaggaagtgattatcgagcaggacccaggttttgtaagcgaagacgacgaggaccgctcagtaccaacagaggataaaaagcaagaccaggacaacgcagaggcaaacgaggaacaagtcgggcggggggacgaaaggcatggcgactacctagatgtgggagacgacgtgctgttgaagcatctgcagcgccagtgcgccattatctgcgacgcgttgcaagagcgcagcgatgtgcccctcgccatagcggatgtcagccttgcctacgaacgccacctattctcaccgcgcgtaccccccaaacgccaagaaaacggcacatgcgagcccaacccgcgcctcaacttctaccccgtatttgccgtgccagaggtgcttgccacctatcacatctttttccaaaactgcaagatacccctatcctgccgtgccaaccgcagccgagcggacaagcagctggccttgcggcagggcgctgtcatacctgatatcgcctcgctcaacgaagtgccaaaaatctttgagggtcttggacgcgacgagaagcgcgcggcaaacgctctgcaacaggaaaacagcgaaaatgaaagtcactctggagtgttggtggaactcgagggtgacaacgcgcgcctagccgtactaaaacgcagcatcgaggtcacccactttgcctacccggcacttaacctaccccccaaggtcatgagcacagtcatgagtgagctgatcgtgcgccgtgcgcagcccctggagagggatgcaaatttgcaagaacaaacagaggagggcctacccgcagttggcgacgagcagctagcgcgctggcttcaaacgcgcgagcctgccgacttggaggagcgacgcaaactaatgatggccgcagtgctcgttaccgtggagcttgagtgcatgcagcggttctttgctgacccggagatgcagcgcaagctagaggaaacattgcactacacctttcgacagggctacgtacgccaggcctgcaagatctccaacgtggagctctgcaacctggtctcctaccttggaattttgcacgaaaaccgccttgggcaaaacgtgcttcattccacgctcaagggcgaggcgcgccgcgactacgtccgcgactgcgtttacttatttctatgctacacctggcagacggccatgggcgtttggcagcagtgcttggaggagtgcaacctcaaggagctgcagaaactgctaaagcaaaacttgaaggacctatggacggccttcaacgagcgctccgtggccgcgcacctggcggacatcattttccccgaacgcctgcttaaaaccctgcaacagggtctgccagacttcaccagtcaaagcatgttgcagaactttaggaactttatcctagagcgctcaggaatcttgcccgccacctgctgtgcacttcctagcgactttgtgcccattaagtaccgcgaatgccctccgccgctttggggccactgctaccttctgcagctagccaactaccttgcctaccactctgacataatggaagacgtgagcggtgacggtctactggagtgtcactgtcgctgcaacctatgcaccccgcaccgctccctggtttgcaattcgcagctgcttaacgaaagtcaaattatcggtacctttgagctgcagggtccctcgcctgacgaaaagtccgcggctccggggttgaaactcactccggggctgtggacgtcggcttaccttcgcaaatttgtacctgaggactaccacgcccacgagattaggttctacgaagaccaatcccgcccgccaaatgcggagcttaccgcctgcgtcattacccagggccacattcttggccaattgcaagccatcaacaaagcccgccaagagtttctgctacgaaagggacggggggtttacttggacccccagtccggcgaggagctcaacccaatccccccgccgccgcagccctatcagcagcagccgcgggcccttgcttcccaggatggcacccaaaaagaagctgcagctgccgccgccacccacggacgaggaggaatactgggacagtcaggcagaggaggttttggacgaggaggaggaggacatgatggaagactgggagagcctagacgaggaagcttccgaggtcgaagaggtgtcagacgaaacaccgtcaccctcggtcgcattcccctcgccggcgccccagaaatcggcaaccggttccagcatggctacaacctccgctcctcaggcgccgccggcactgcccgttcgccgacccaaccgtagatgggacaccactggaaccagggccggtaagtccaagcagccgccgccgttagcccaagagcaacaacagcgccaaggctaccgctcatggcgcgggcacaagaacgccatagttgcttgcttgcaagactgtgggggcaacatctccttcgcccgccgctttcttctctaccatcacggcgtggccttcccccgtaacatcctgcattactaccgtcatctctacagcccatactgcaccggcggcagcggcagcggcagcaacagcagcggccacacagaagcaaaggcgaccggatagcaagactctgacaaagcccaagaaatccacagcggcggcagcagcaggaggaggagcgctgcgtctggcgcccaacgaacccgtatcgacccgcgagcttagaaacaggatttttcccactctgtatgctatatttcaacagagcaggggccaagaacaagagctgaaaataaaaaacaggtctctgcgatccctcacccgcagctgcctgtatcacaaaagcgaagatcagcttcggcgcacgctggaagacgcggaggctctcttcagtaaatactgcgcgctgactcttaaggactagtttcgcgccctttctcaaatttaagcgcgaaaactacgtcatctccagcggccacacccggcgccagcacctgtcgtcagcgccattatgagcaaggaaattcccacgccctacatgtggagttaccagccacaaatgggacttgcggctggagctgcccaagactactcaacccgaataaactacatgagcgcgggaccccacatgatatcccgggtcaacggaatccgcgcccaccgaaaccgaattctcttggaacaggcggctattaccaccacacctcgtaataaccttaatccccgtagttggcccgctgccctggtgtaccaggaaagtcccgctcccaccactgtggtacttcccagagacgcccaggccgaagttcagatgactaactcaggggcgcagcttgcgggcggctttcgtcacagggtgcggtcgcccgggcagggtataactcacctgacaatcagagggcgaggtattcagctcaacgacgagtcggtgagctcctcgcttggtctccgtccggacgggacatttcagatcggcggcgccggccgtccttcattcacgcctcgtcaggcaatcctaactctgcagacctcgtcctctgagccgcgctctggaggcattggaactctgcaatttattgaggagtttgtgccatcggtctactttaaccccttctcgggacctcccggccactatccggatcaatttattcctaactttgacgcggtaaaggactcggcggacggctacgactgaatgttaagtggagaggcagagcaactgcgcctgaaacacctggtccactgtcgccgccacaagtgctttgcccgcgactccggtgagttttgctactttgaattgcccgaggatcatatcgagggcccggcgcacggcgtccggcttaccgcccagggagagcttgcccgtagcctgattcgggagtttacccagcgccccctgctagttgagcgggacaggggaccctgtgttctcactgtgatttgcaactgtcctaaccttggattacatcaagatctttgttgccatctctgtgctgagtataataaatacagaaattaaaatatactggggctcctatcgccatcctgtaaacgccaccgtcttcacccgcccaagcaaaccaaggcgaaccttacctggtacttttaacatctctccctctgtgatttacaacagtttcaacccagacggagtgagtctacgagagaacctctccgagctcagctactccatcagaaaaaacaccaccctccttacctgccgggaacgtacgagtgcgtcaccggccgctgcaccacacctaccgcctgaccgtaaaccagactttttccggacagacctcaataactctgtttaccagaacaggaggtgagcttagaaaacccttagggtattaggccaaaggcgcagctactgtggggtttatgaacaattcaagcaactctacgggctattctaattcaggtttctctagaatcggggttggggttattctctgtcttgtgattctctttattcttatactaacgcttctctgcctaaggctcgccgcctgctgtgtgcacatttgcatttattgtcagctttttaaacgctggggtcgccacccaagatgattaggtacataatcctaggtttactcacccttgcgtcagcccacggtaccacccaaaaggtggattttaaggagccagcctgtaatgttacattcgcagctgaagctaatgagtgcaccactcttataaaatgcaccacagaacatgaaaagctgcttattcgccacaaaaacaaaattggcaagtatgctgtttatgctatttggcagccaggtgacactacagagtataatgttacagttttccagggtaaaagtcataaaacttttatgtatacttttccattttatgaaatgtgcgacattaccatgtacatgagcaaacagtataagttgtggcccccacaaaattgtgtggaaaacactggcactttctgctgcactgctatgctaattacagtgctcgctttggtctgtaccctactctatattaaatacaaaagcagacgcagctttattgaggaaaagaaaatgccttaatttactaagttacaaagctaatgtcaccactaactgctttactcgctgcttgcaaaacaaattcaaaaagttagcattataattagaataggatttaaaccccccggtcatttcctgctcaataccattcccctgaacaattgactctatgtgggatatgctccagcgctacaaccttgaagtcaggcttcctggatgtcagcatctgactttggccagcacctgtcccgcggatttgttccagtccaactacagcgacccaccctaacagagatgaccaacacaaccaacgcggccgccgctaccggacttacatctaccacaaatacaccccaagtttctgcctttgtcaataactgggataacttgggcatgtggtggttctccatagcgcttatgtttgtatgccttattattatgtggctcatctgctgcctaaagcgcaaacgcgcccgaccacccatctatagtcccatcattgtgctacacccaaacaatgatggaatccatagattggacggactgaaacacatgttcttttctcttacagtatgattaaatgagacatgattcctcgagtttttatattactgacccttgttgcgcttttttgtgcgtgctccacattggctgcggtttctcacatcgaagtagactgcattccagccttcacagtctatttgctttacggatttgtcaccctcacgctcatctgcagcctcatcactgtggtcatcgcctttatccagtgcattgactgggtctgtgtgcgctttgcatatctcagacaccatccccagtacagggacaggactatagctgagcttcttagaattctttaattatgaaatttactgtgacttttctgctgattatttgcaccctatctgcgttttgttccccgacctccaagcctcaaagacatatatcatgcagattcactcgtatatggaatattccaagttgctacaatgaaaaaagcgatctttccgaagcctggttatatgcaatcatctctgttatggtgttctgcagtaccatcttagccctagctatatatccctaccttgacattggctggaaacgaatagatgccatgaaccacccaactttccccgcgcccgctatgcttccactgcaacaagttgttgccggcggctttgtcccagccaatcagcctcgccccacttctcccacccccactgaaatcagctactttaatctaacaggaggagatgactgacaccctagatctagaaatggacggaattattacagagcagcgcctgctagaaagacgcagggcagcggccgagcaacagcgcatgaatcaagagctccaagacatggttaacttgcaccagtgcaaaaggggtatcttttgtctggtaaagcaggccaaagtcacctacgacagtaataccaccggacaccgccttagctacaagttgccaaccaagcgtcagaaattggtggtcatggtgggagaaaagcccattaccataactcagcactcggtagaaaccgaaggctgcattcactcaccttgtcaaggacctgaggatctctgcacccttattaagaccctgtgcggtctcaaagatcttattccctttaactaataaaaaaaaataataaagcatcacttacttaaaatcagttagcaaatttctgtccagtttattcagcagcacctccttgccctcctcccagctctggtattgcagcttcctcctggctgcaaactttctccacaatctaaatggaatgtcagtttcctcctgttcctgtccatccgcacccactatcttcatgttgttgcagatgaagcgcgcaagaccgtctgaagataccttcaaccccgtgtatccatatgacacggaaaccggtcctccaactgtgccttttcttactcctccctttgtatcccccaatgggtttcaagagagtccccctggggtactctctttgcgcctatccgaacctctagttacctccaatggcatgcttgcgctcaaaatgggcaacggcctctctctggacgaggccggcaaccttacctcccaaaatgtaaccactgtgagcccacctctcaaaaaaaccaagtcaaacataaacctggaaatatctgcacccctcacagttacctcagaagccctaactgtggctgccgccgcacctctaatggtcgcgggcaacacactcaccatgcaatcacaggccccgctaaccgtgcacgactccaaacttagcattgccacccaaggacccctcacagtgtcagaaggaaagctagccctgcaaacatcaggccccctcaccaccaccgatagcagtacccttactatcactgcctcaccccctctaactactgccactggtagcttgggcattgacttgaaagagcccatttatacacaaaatggaaaactaggactaaagtacggggctcctttgcatgtaacagacgacctaaacactttgaccgtagcaactggtccaggtgtgactattaataatacttccttgcaaactaaagttactggagccttgggttttgattcacaaggcaatatgcaacttaatgtagcaggaggactaaggattgattctcaaaacagacgccttatacttgatgttagttatccgtttgatgctcaaaaccaactaaatctaagactaggacagggccctctttttataaactcagcccacaacttggatattaactacaacaaaggcctttacttgtttacagcttcaaacaattccaaaaagcttgaggttaacctaagcactgccaaggggttgatgtttgacgctacagccatagccattaatgcaggagatgggcttgaatttggttcacctaatgcaccaaacacaaatcccctcaaaacaaaaattggccatggcctagaatttgattcaaacaaggctatggttcctaaactaggaactggccttagttttgacagcacaggtgccattacagtaggaaacaaaaataatgataagctaactttgtggaccacaccagctccatctcctaactgtagactaaatgcagagaaagatgctaaactcactttggtcttaacaaaatgtggcagtcaaatacttgctacagtttcagttttggctgttaaaggcagtttggctccaatatctggaacagttcaaagtgctcatcttattataagatttgacgaaaatggagtgctactaaacaattccttcctggacccagaatattggaactttagaaatggagatcttactgaaggcacagcctatacaaacgctgttggatttatgcctaacctatcagcttatccaaaatctcacggtaaaactgccaaaagtaacattgtcagtcaagtttacttaaacggagacaaaactaaacctgtaacactaaccattacactaaacggtacacaggaaacaggagacacaactccaagtgcatactctatgtcattttcatgggactggtctggccacaactacattaatgaaatatttgccacatcctcttacactttttcatacattgcccaagaataaagaatcgtttgtgttatgtttcaacgtgtttatttttcaattgcagaaaatttcaagtcatttttcattcagtagtatagccccaccaccacatagcttatacagatcaccgtaccttaatcaaactcacagaaccctagtattcaacctgccacctccctcccaacacacagagtacacagtcctttctccccggctggccttaaaaagcatcatatcatgggtaacagacatattcttaggtgttatattccacacggtttcctgtcgagccaaacgctcatcagtgatattaataaactccccgggcagctcacttaagttcatgtcgctgtccagctgctgagccacaggctgctgtccaacttgcggttgcttaacgggcggcgaaggagaagtccacgcctacatgggggtagagtcataatcgtgcatcaggatagggcggtggtgctgcagcagcgcgcgaataaactgctgccgccgccgctccgtcctgcaggaatacaacatggcagtggtctcctcagcgatgattcgcaccgcccgcagcataaggcgccttgtcctccgggcacagcagcgcaccctgatctcacttaaatcagcacagtaactgcagcacagcaccacaatattgttcaaaatcccacagtgcaaggcgctgtatccaaagctcatggcggggaccacagaacccacgtggccatcataccacaagcgcaggtagattaagtggcgacccctcataaacacgctggacataaacattacctcttttggcatgttgtaattcaccacctcccggtaccatataaacctctgattaaacatggcgccatccaccaccatcctaaaccagctggccaaaacctgcccgccggctatacactgcagggaaccgggactggaacaatgacagtggagagcccaggactcgtaaccatggatcatcatgctcgtcatgatatcaatgttggcacaacacaggcacacgtgcatacacttcctcaggattacaagctcctcccgcgttagaaccatatcccagggaacaacccattcctgaatcagcgtaaatcccacactgcagggaagacctcgcacgtaactcacgttgtgcattgtcaaagtgttacattcgggcagcagcggatgatcctccagtatggtagcgcgggtttctgtctcaaaaggaggtagacgatccctactgtacggagtgcgccgagacaaccgagatcgtgttggtcgtagtgtcatgccaaatggaacgccggacgtagtcatatttcctgaagcaaaaccaggtgcgggcgtgacaaacagatctgcgtctccggtctcgccgcttagatcgctctgtgtagtagttgtagtatatccactctctcaaagcatccaggcgccccctggcttcgggttctatgtaaactccttcatgcgccgctgccctgataacatccaccaccgcagaataagccacacccagccaacctacacattcgttctgcgagtcacacacgggaggagcgggaagagctggaagaaccatgtttttttttttattccaaaagattatccaaaacctcaaaatgaagatctattaagtgaacgcgctcccctccggtggcgtggtcaaactctacagccaaagaacagataatggcatttgtaagatgttgcacaatggcttccaaaaggcaaacggccctcacgtccaagtggacgtaaaggctaaacccttcagggtgaatctcctctataaacattccagcaccttcaaccatgcccaaataattctcatctcgccaccttctcaatatatctctaagcaaatcccgaatattaagtccggccattgtaaaaatctgctccagagcgccctccaccttcagcctcaagcagcgaatcatgattgcaaaaattcaggttcctcacagacctgtataagattcaaaagcggaacattaacaaaaataccgcgatcccgtaggtcccttcgcagggccagctgaacataatcgtgcaggtctgcacggaccagcgcggccacttccccgccaggaaccttgacaaaagaacccacactgattatgacacgcatactcggagctatgctaaccagcgtagccccgatgtaagctttgttgcatgggcggcgatataaaatgcaaggtgctgctcaaaaaatcaggcaaagcctcgcgcaaaaaagaaagcacatcgtagtcatgctcatgcagataaaggcaggtaagctccggaaccaccacagaaaaagacaccatttttctctcaaacatgtctgcgggtttctgcataaacacaaaataaaataacaaaaaaacatttaaacattagaagcctgtcttacaacaggaaaaacaacccttataagcataagacggactacggccatgccggcgtgaccgtaaaaaaactggtcaccgtgattaaaaagcaccaccgacagctcctcggtcatgtccggagtcataatgtaagactcggtaaacacatcaggttgattcatcggtcagtgctaaaaagcgaccgaaatagcccgggggaatacatacccgcaggcgtagagacaacattacagcccccataggaggtataacaaaattaataggagagaaaaacacataaacacctgaaaaaccctcctgcctaggcaaaatagcaccctcccgctccagaacaacatacagcgcttcacagcggcagcctaacagtcagccttaccagtaaaaaagaaaacctattaaaaaaacaccactcgacacggcaccagctcaatcagtcacagtgtaaaaaagggccaagtgcagagcgagtatatataggactaaaaaatgacgtaacggttaaagtccacaaaaaacacccagaaaaccgcacgcgaacctacgcccagaaacgaaagccaaaaaacccacaacttcctcaaatcgtcacttccgttttcccacgttacgtaacttcccattttaagaaaactacaattcccaacacatacaagttactccgccctaaaacctacgtcacccgccccgttcccacgccccgcgccacgtcacaaactccaccccctcattatcatattggcttcaatccaaaataaggtatattattgatgatg

SEQ ID NO: 99-100 - skipped (2 entries)

SEQ ID NO: 101 - DNA, 136 bp, Human adenovirus
  misc_feature 1..136: note = Human adenovirus 3, Ad3 5? (left) ITR
  source 1..136: mol_type = genomic DNA
ctatctatataatataccttatagatggaatggtgccaacatgtaaatgaggtaatttaaaaaagtgcgcgctgtgtggtgattggctgcggggttaacggctaaaaggggcggcgcgaccgtgggaaaatgacgt

SEQ ID NO: 102 - DNA, 136 bp, Human adenovirus
  misc_feature 1..136: note = Human adenovirus 3, Ad3 3? (right) ITR
  source 1..136: mol_type = genomic DNA
acgtcattttcccacggtcgcgccgccccttttagccgttaaccccgcagccaatcaccacacagcgcgcacttttttaaattacctcatttacatgttggcaccattccatctataaggtatattatatagatag

SEQ ID NO: 103 - DNA, 343 bp, Human adenovirus
  misc_feature 1..343: note = Human adenovirus 3, Ad3 Packaging Sequence
  source 1..343: mol_type = genomic DNA
gacttatgtgggaggagttatgttgcaagttattacggtaaatgtgacgtaaaacgaggtgtggtttgaacacggaagtagacagttttcccacgcttactgacaggatatgaggtagttttgggcggatgcaagtgaaaattctccattttcgcgcgaaaactaaatgaggaagtgaatttctgagtcatttcgcggttatgccagggtggagtatttgccgagggccgagtagactttgaccgtttacgtggaggtttcgattaccgtgtttttcacctaaatttccgcgtacggtgtcaaagttctgtgtttttacgtaggtgtcagctgatcgctaggg

SEQ ID NO: 104 - DNA, 3439 bp, Human adenovirus
  misc_feature 1..3439: note = Human adenovirus 3, Ad3 E1
  source 1..3439: mol_type = genomic DNA
tatttaaacctgacgagttccgtcaagaggccactcttgagtgccagcgagaagagttttctcctccgcgccgcaagtcagttctgcgctttgaaaatgagacacctgcgcttcctgccacaggaggttatctccagtgagaccgggatcgaaatactggagtttgtggtaaataccctaatgggagacgacccggaaccgccagtgcagcctttcgatccacctacgctgcacgatctgtatgatttagagatagacgggccggaggatcccaatgaggaagctgtgaatgggttttttactgattctatgctgctagctgctgatgaaggattggacataaaccctcctcctgagacacttgttaccccaggggtggttgtggaaagcggcataggtgggaaaaaattgcctgatctgggagcagctgaaatggacttgcgttgttatgaagagggttttcctcccagtgatgatgaagatggggaaactgagcagtccatccataccgcagtaaatgagggagtaaaagctgccagcgatgtttttaagttggactgtccggagctgcctggacatggctgtaagtcttgtgaatttcacaggaataacactggaatgaaagaactattgtgctcgctttgctatatgagaatgcactgccactttatttacagtaagtgtatttaagtgaaatttaaaggaatagtgtagctatttaataactgttgaatggtagatttatgtttttttcttgcgattttttgtaggtcctgtgtctgatgatgagtcaccttctcctgattcaactacctcacctcctgaaattcaggcgcccgcacctgcaaacgtatgcaagcccattcctgtgaagcctaagcctgggaaacgccctgctgtggataagcttgaggacttgttggagggtggggatggacctttggaccttagtacccggaaactgccaaggcaatgagtgccctgcagctgtgtttatttaatgtgacgtcatgtaataaaattatgtcagctgctgagtgttttattacttcttgggtggggacttggatatataagtaggagcagatctgtgtggttagctcacagcaacctgctgccatccatggaggtttgggctatcttggaagacctcagacagactaagctactgctagaaaacgcctcggacggagtctctggcctttggagattctggttcggtggtgatctagctaggctagtgtttaggataaaacaggactacagggaagaatttgaaaagttattggacgatagtccgggactttttgaagctcttaacttgggtcatcaggctcattttaaggagaaggttttatcagttttagatttttctactcctggtagaactgctgctgctgtagcttttcttacttttatattggataaatggatccgccaaactcacttcagcaagggatacgttttggatttcatagcagcagctttgtggagaacatggaaggctcgcaggatgaggacaatcttagattactggccagtgcagcctctgggagtagcagggatactgagacacccaccgaccatgccagcggttctgcaggaggagcagcaggaggacaatccgagagccggcctggaccctccggtggaggagtagctgacctgtttcctgaactgcgacgggtgcttactaggtctacgaccagtggacagaacaggggaattaagagggagaggaatcctagtgggaataattcaagaaccgagttggctttaagtttaatgagccgcaggcgtcctgaaactgtttggtggcatgaggttcagagcgaaggcagggatgaagtttcaatattgcaggagaaatattcactagaacaacttaagacctgttggttggaacctgaggatgattgggaggtggccattaggaattatgctaagatatctctgaggcctgataaacaatatagaattactaagaagattaatattagaaatgcatgctacatatcagggaatggggcagaggttataatagatacacaagataaagcagtttttagatgttgtatgatgggtatgtggccaggggttgtcggcatggaagcagtaacacttatgaatattaggtttaaaggggatgggtataatggcattgtatttatggctaacactaagctgattctacatggttgtagcttttttgggtttaataatacgtgtgtagaagcttgggggcaagttagtgtgaggggttgtagtttttatgcatgctggattgcaacatcaggtagggtcaagagtcagttgtctgtgaagaaatgcatgtttgagagatgtaatcttggcatactgaatgaaggtgaagcaagggtccgccactgcgcagctacagaaactggctgcttcattctaataaagggaaatgccagtgtgaagcataatatgatctgtggacattcggatgagaggccttatcagatgctgacctgcgctggtggacattgcaatattcttgctaccgtgcatatcgtttcacatgcacgcaaaaaatggcctgtatttgaacataatgtgattaccaagtgcaccatgcacataggtggtcgcaggggaatgtttatgccttaccagtgtaacatgaatcatgtgaaggtaatgttggaaccagatgccttttccagagtgagcttaacaggaatctttgatatgaatattcaactatggaagatcctgagatatgatgacactaaaccaagggtgcgcgcatgcgaatgcggaggcaagcatgctagattccagccggtgtgcgtggatgtgactgaagacttgagacccgatcatttggtgcttgcctgcactggagcggagttcggttctagtggtgaagaaactgactaaagtgagtagtggggcaagatgtggatggggactttcaggttggtaaggtgggcagattgggtaaattttgttaatttctgtcttgcagctgccatgagtggaagcgcttcttttgaggggggagtatttagcccttatctgacgggcaggctcccaccatgggcaggagttcgtcagaatgtcatgggatccactgtggatgggagacccgtccagcccgccaattcctcaacgctgacctatgccactttgagttcgtcaccattggatgcagctgcagccgccgccgctactgctgccgccaacaccatccttggaatgggctattatggaagcatcgttgccaattccagttcctctaataacccttcaaccctggctgaggacaagctacttgttctcttggcgcagctcgaggccttaacccaacgcttaggcgaactgtctaagcaggtggcccagttgcgtgagcaaactgagtctgctgttgccacagcaaagtctaaataaagatctcaaatcaataaataaa

SEQ ID NO: 105 - DNA, 22697 bp, Human adenovirus
  misc_feature 1..22697: note = Human adenovirus 3, Ad3 E2
  source 1..22697: mol_type = genomic DNA
tttaagagtcagcgcgcagtacttgttgaagagagcctcggcgtcctcgagagtgcgctgaagttggtcttcgctcttgtgatacaaacaacttctggtgagcgagcgcagagatcggttttttactttcagttcctgctcttgcccccgactctgctggaaaatggcatagagggttggaaagatccggttcctcagctctctggtctgcgctggctcgttcgctgtgatcctcagtcctcctcctggtgcacttgttgtggattttctaactgctggttttctggtcaccgttgtcgctgctgtatttttctgtcggggttgccgggacttgctgactgcagtaggggctgtggaggtgacggtagtaatgcaagatattgcgggggaagtttacaccgtggtggaagagcaggtatcgccgggtgaaggatatgttgcccccgcattcatgcaagcaggagatgatagcgtttttatgtccacgccaggacttgtatccctgtcgctccttcttaccggtcttggaagcggtggtcgggtttgggaatcgcccggtctcgtcccatctactgttgggccgccgctgggccccccgacccggagcggagatggtagccgtgctgctgtctggggacttgcttgtctccgccgccgatgacaactgtttggcggcggttgcttcttccacctcctctgcctcctcgtcttcctcctccaaactgtcttcctccaggctgtccacctcctctgcctggctgtcccaatcttccatctcctcctctgcctgactgtcccagtcttccttcatatcctctgggggcgacagctgcaccttcaacttcttgcttcctcggcgatgggacatcctgggggaaccttgtgttgagctcctcaccggtctgagggtcaaggtagaccccgtttcccttttttagcagaaattcttggcgagatttttggatggcttgcaattgggccagaattgctccctgggtgatgacgcaggctgagagctcgactttgggaggatgtgattggtcctcatagaacctgatctcatagggatggtagtcctcggggtgaaacttgcgcaggtaggcggaggtccacagccccggtgtcagtttcaaactctgccccggagaagacccctcgcctttacttctgggaccctgcagctcgaaggtgccgataatctgggtctcgctcagcaactgggggttgcaggcaagggagcggtggggtgtgcaaagattgcagcggcagtggcattccagcaggccgtctccgctcacatcctctataacatccgagtggtaggagaggtagttggccaggcggaacaggtagcagtggctccatagcggcggtgggcactcgcggtaggtgagaggcacaaagtcggagggcagcgcacagcaggtggcaggcaggataccggagcgttccaggatgaaagagcgaaagttgttaagcatgctctggctcataaagtctggcaggccgtttcgcagagtaaccctgagacgctcggggaagatgatgtctgccaggtccgaggcgacggtgcgctcatcaaaacctgtccacagggctttgagggatctctgcaagagcttgtccagctcttttaggttctgctcttccaaacactgttgccacacacccataccagtttgccaggtatggcagaggtagaggtagacacagtctcggatgtagtcacggcgggcctcccctttaagggtggtgtgcaggacgctctgccctagtcggttctcatgcaaaatgcccatgtaagaaaccaggttggtaagctccacgttggagatcttgcatgcctgccgcacgaagccatgtctaaaggtgtagtgcaggttctcctctagcttgcgcagggtctcagggtcggtgaaaaagcggcgcagacactccagctccacagttactagcactacagccatcataagcttgcgcctctcttccaaatctcggggggagttggtacccagccagcgagatagctgctcgtcactgactaccggcttgccctcgtccgaggcgtctggatcctgcatgttctggttttctgaaagaggtcttgctcgtttgatgagcagatggtccatgacagcgctcataactttggggggcaggttaacagcggggtaggcaaaatgggtgaccacgatactgcgcttgagcactgcaatccgggcattgtcaccctccagttccaccagagcgctgtggtgttcatccatgtcattctctccctgttgcagagcatttgcggcccgtgtctcatcacttcccagaccctcaaagatctttggaacctcttccaaggaagctatatcaggtaagcgagctcccggacccaagttgagcagggcatcggcgcgggtgcggttggcgcggcaggagactggaatcttttggttcttgaaaaagatgtggtaggtggccaacacttcggggatagtaaaagctggatagaagttgagtcgagggttggcctcgcaggtgccgtttggctgccgcttggggggtacctgaggcgaaaagaggttcagctcgtaggcgcggctaagctcttccacactgatgggcacttcagtgagatcgagcaatgcgtctttaactatgatcgactgccttgctagatgtttgaggagcacgtcctccccaccaaggccggtgaggtagtcggcgacatgatccctgatcccagcctcctggtaaacgccatctgcttgatgctctgggcggtcgtcatcctctctgtctagaaagcgtttcagctcctcctggtgctccgccggcgtcacatagcccgggtcctgctcgacatctgcctcaatctcttccgttttcacattatcctgcgcctgcatctcctgggctgcgtcgacctcctcctcatcatcgagggtagaggtggtggtagcgggactgggtggtggggtggttaagctctcctcctcgtcgctgctgggggcgaggtgtgatggtgcttgcagcgatgttggcagtgatggctgagtttccatgtctgttgtttctctgcctaggagaacacaatggccagccgcggaggaaatcagtcaagcgaccgccaccgggagcacacccccgaacgcggaatgagctctgccagccatccgcctccaaggccagaccgcagcccatctcagtcgcctccacctctgcccccgaagaggaacacctaccgtcgtgtggggtccggttcttctaccgagagccaggtggtattggtaagcgaaacttcgcagtcatccctgtctccggagcggagcaacagtcctcccccgatccctcccaagaagaagcccaggaagaccaagcatgtccctctgcaagacatcagccaggatagtgaagaagaaagagaacaggctcagttggtggccgtgggcttcagctaccccccggtgcgcatcattgagaaggatggcaagagaagtgttgagaagatcgacaagaatgaccctatagctaaaggagctacttttattgctgttaggaatcctttgagtctgcccctggtatctgcctgggagaagggcatggaagtgatggctgtgctaatggaaaggtacaggctggataatgatctgagaacctctttcaagctgatgccagagcagcacgagcaatacaagcgtatctgccaccagtatgtgaacgaggagcaccgtggcatcccgctgacatttaccagcatgaagaccttgacaacaatgatgggaagattcatgcagggattggtacattattattctgagatcgcccacaataattgggagtgcaccgggtgcgctctgtgggctcatggatgcaccgattatgaaggcaaggtgaaatgcctgcatggcactatcatgatccagaaggaccacattatcgagatggatgtggcgagcgagaacgggcagcgcgctatgaaggagaatccagacagagccaagatcacccaaaaccgctggggcagaaatgtggttcagttggccaacaacgatgcccgctgttgtgtgaatgatgccaactgtactactaatcaattttccagcaagtcctgtgggatgttctacaccgagggaagtaaggcccaggaagcttttaagcagtacgaagccttcatgaaggctgtgtacccagggataactcccgaccaagccaggatgatgctgatccccattcattgtgattgcaaccacaagccaggctgcgctcccgtgatgggcaggcagacatgtaagatgaccccctttgggatggccaatgctgaagacttggatgtgactaccatcagtgacccaaccgtgttggcaagcgtaagacacccagcgttgatagtgttccagtgttgcaacccagtgtatcgcaactcccgtgtccagaatgccggccccaactgtgatttcaagatctctgctcctgacctgcttggcgctatgcaactgaccagaaagttgtggcaagacacctttcccgagattccagttcccaagctggtaatccccgagttcaagtggcagaacaggttacagttccgcaacgtatccctgcccgcgggtcactctgactcccgccagaacccattcgacttctgagtaaatgatgaaacaaatgagcaaaaccagagcctcagtgcatgtaaaaataaagtgctgtttattgaacacggttttacatgacttattgcatatccatacggtcaaacgcggtggccctttcaatgcgcgcgcggtgagaacgaaagtaagatgagtgggtgtttaggaagcggtatagcacctcctggttgcggcgcagggtgggctggacttggggtgattggagcatgctgttggacaccccagtcagcaacttcatggtggggtttccgtccatggggcggtcgggccagtgcacaaaggcatgaaggaacatacagcaaaaaagtccacaggcggctgagcgcggaccctgcacgctttgggtagacttctccagggtgatgcagcggtctttggtagcaagggcactgcgacgcaggagcccctcgtactcaaactggtaaatctgtttgagccgctcatccgagaacccaaaaggatcaaaaaggtagcaggtgttgtagcgcgggttccaaccaaaagccagccagtgctctccccccgtctcgcgtccggcagtgttgactatggcgcaggcgagcttgtcgggggccatgaaccccgggaaacgcttgtcaaaggttcccaggaaatagggtccgcagcccaggtctcggacgatggctttgagctcttgctcgctggagccgtttccggacccgcatgtcatggctgcagctgctgcttgcaagaagcaagaggcttcttatgtggtggcgttgccggccgagaacggtgtgcgcaggtagacggcctcgatgacgccgcggtgtggctggtgcactctgaccacgtcgaagacttcgaaaagaagataaagcagggtgggctcatccatgggatccacctcaaaagtcatgtccagcgcatgggctgagttggcatagagcatgttctgtcccaggtcggtaagggcccccatggacatgaagttgctggagaagggaatgcgccacatggtcctgtcgcacaggaactttttctgggtgacactcttaacggcagtagttccgatgagcgggtatggataattggctgggtaaggttccccttgtctcatagtaggtgcaaggtaccctacaaagccagagttgttgtgttggtatggtaaggtgacggctttgtagtcagtgtaattaacctcatcaaccacctgcctgctcataggctggaagtttctgaaaaaggagtacatgcgatccttgtatccctcagggatgtaaaagccctggtagccaatgttgtaattggcaagcatctgaaccaggaaccagtctttggtcatgttgcattgtgccacgttgtatccttccccgtccacagtgcgcttgatttcaaactcatttggactcaacagcctgtcattgccaggccagctgactgaggagtcaaacatgatggagaccttcttgaaagtgtggttaaggtaaaaggtgccatccaggtagggaatagatccagaatatacgaagtagggatcgaaccctgatccaagagatggagtctccttggttttgagtctggtgaaggaccagcccctgaaggctgcccagttgcgagatgggatggaaattggaatgttggttgcattggcaggaatggggtaaagcatgttagctgcagagaggtagtcgttaaatgactgatcattggtatcgttgcgcagcatggcttcaagggtggaagctgtgttgtgagccatggggaagaaggtggcatagagattgatgctggtgaaacttatggtagcaccatccgttctgaggtcatttccaagggaactttgcaggaccatgttcacatcctttcggaagttccactcgtaggtgtaggagccaggtagaagaagtaggttcttgacagcaaagaatttctgaggcacttgtatgtggaaaggcacataacgaccatttcccagaagcatggacctgtagcgcagaccagcattgcggtggtggttgaatggattcacattgtccattgggtcaagagaccacctggcgccaatgttgatgtatgaatcaaccagggatggggataccactcgcccgttcatgtactcataggtgttggtgttagtgggcaaagtaatgttaggtggcgtgtacttgtaaacatctggaaggtacaaagccacattagagtacagaaaacttctccaaaggttagcttggatattaatttccatagccaggttgttgcctatggttatttcattagctggagcaacattagcatctttttcccatccattagtgtcatcggttttaactttaatgccttgatatgtgtgccctggtcctatgccattcagaggaaaacagtaattaggcagttcatcctcgatgccatgattttcaataatgcgaacatcgggatcgtaactgtccacagcctgattccacatgctgaagtatctggttctgtctcccagagaatcaagcaaaagctgatatgacagttcagtatttctgtcctgcaagtcaaccactgcattcagttgtgatgcttggccagccaaaactcccatatttccagtactgttgtagtacattaggcctacgaagttatccctgaagccaatgtaattgggtctgttaggcatggcttgttgacccaaatttgcatgagagttattagacgtttctggtttatataccacatgactgtctggagtttccaaatttacattttccgtataaagcacaatttcaggcgctaaagctcctgcaacagcatctctaccatcgaaaaattccatatcaatatctggttcctcagtttcaacccctccttcggttgttggttttacttttctgtttttagcttggcccccttttatgtttgtaggtcttgcaaaagacccgtagcatggcttcatgttggtagctggtttaagggctcttccaccaaacttttcatttgttccatcagtatcagtccatgattcttctccaacttgaggctctggctgatatgttttatcggcataaatgggcttttcttctccttcagtagtggtaatgtctttcccaatttgcaaaccttctttagtaatattgtctcccttcatggaagcaatgccaaatgtgtttgtggtggtagttactgcattgtccccatttgttgtaactatccactgagatgtattgggcgcgcccttaggagcgagtgaattgtaagctgtgccggaatatggcttgaagctaggacctctatcaagcaccccccgaatgtcaaagaatgtgctggccatgtcaagcactctgttgtcgcctacagccagcgtgtagcgaactttgtaagagtaggtattgtcttcccggtcaacgggcacgaagcgcagcatcaggcgctggctacggtcggtggtcacatcgtgggtgggcgccactgtggggtttctaaatttgttccccatactgaagtaggtgtctgttgcacgggcgaactgcaccagacccggactgaggtactccgaagcatcctgtccggcgatgtgcatgtatgcccattggggcatcatcgatggggtggccatcttgaaagcaactcagcctcggcgcgcgacctcttcctttctcctctgctgcggcggcgtggtgatgatacatacacacagacaagcaagttaagcgctactccatatttaattaatagcagcgacggcgctttacactctgcacgcccagacccacgatgctgttcagagtactttgccagtttgctttcgggcgcggtgtgcccccaggacgcggtctggctacggcgacgggctgtacggcggtgggctttctggtagcgacaggtttgggaacaggcgccgcagaagcagggggaggaggcaagtccaaggtggcgggtcgatgtgactgagaaggtttcatcaccccggtagccatgtgagctacaggcctggtagtgggcattccgagctttactgcctcctcatatgaagggggctcgtctgcgcgcgtcaccagcgtctgctctagctcgggtcgcggacgcttgtcgccccgcttttccagcggaggaagttcttcctccacttccatttcaccaggggttgcgggcggcgggtccaggcggctgtttatctgtttttgtacagcctggttggccagatccactacgccgttaataccagaggcgatcccatcgaccaccttctgttggaagttttgttccttaagcttatttctcagagcctgccctgtgctgctgttccaagctttgttcccataggtttttacggtcgagccaaaatttttaagcccgctccagatactgctccaattgaaggcgcccccgttcagttggctcgtgccgatgtcgctccaggtgcccatgtacggcctcgtgccgtgtcgcggagccagggatgaaaaattgatgtcttccatctctacaaaaacatagtcacaggaccaggagcgtcagagtccattctattttttatttataagttttttccaatgttagtggcgctgcgaggcctgaaccgccactgaagctatgcctggtatcgccccgatcgctgcggcgatgatgggtataagagctggcaaaaagccaccccctaatcgtctgctgatagcgcgccttcgtctgtggcggcgcatccctcgccccaacatccttctacggcgcgagtttcttcctcggtagccagtaatggggacgcgaaggcggcaagtgagggccatatctgcaaggaggcagcgtcaacagtcattaagtggtgatgcttggatggtagcgcgcgcgcggcagcgtcagaggttcagcgcgaccatcgcggtacactctccgcaccagggcggcgggagtcaatttgctggcagtgttgcggcggcggcgacggcgagtgcgacttgcaggtggtttgcggcggcgagaggtgttgctccggtttcgatagtagcgagtgcctctgtaacccggagtgggaatgatggatgggtgcagagcatagttgggcattagcagacttgctgggccgtactttcgtcgtgatcttcgagtggtgctgggggcggcaacgggcgcgggcatccagggttccgtttgcacctcaattgaggtggtgggttttgcaggttcggtctgcacttccatggactcggtgggaatcttgatgtcgaaggtttgtactcccaaacctggcgccacttccttgataggtcttactttgacctcaggctggatatcggcatccactttcattttctccagtacgtcttctagcctctggcgcttgggcaccattagctgcatggtgggatataggtcctcaccctcgcgctttacgcctctccgcgcaggcacgggcagcacttgctgcagggtgactggtttgaggctgggggtgggatttccatgatccaaaggaatggacacagcctcctctttgggactggatctagtgcgcttgccataagcaaactcgtcaaggcggtctgccgcctgctcaagaatatcgtcatccccgtacacctcatcataggaccgtttaaaagtagtgctggaacgctcgccaggtgtaaaaaccacagtggtcccgggtctgagcacttgacgcactttgcgcccgcgccactgcacgcgccgtcttggggcgaactcgcgcacaaactccaccagcccatcatcgtcatcttcttcctttttgttatttttgacccgcttgattttgcggggctttttttcatccttcaccggcggaccgtagatttcaggcgcgatgacctggagcatctcttccttgtatttgcgcttggacatacttgccgctgggacacaacatcggagactgctcagtatcttctaagtgcgaggggggcgggtgcgcacgggcacgcgctggccggtagtggcatcacgcacccagtacacattgcctcttcgcggttgggccatgttggcaatggccgctgctgccgccgtggccgcgcgcctgcgggacctgccgctgctggcacctgaagccgcgcgtctggccgctctaagcatggctcttcgccccacacgtttggccctccgcagaatagcttttgcggctcgcatggcgggagtagccctgtggcgcctggcgatgcgcctccttcggctcttccggcgagcataggcgcgggcgtctgccaccacactgtcaataactgcatccacagtagatgtaggcgcagtaggagtataattacgagcatcggcgaccacctggtcgatcacatcatcgaccgtggtccgagtgcgggtacgacccttgagtgcgccccagggagcgcggaaatgaccgcgaacgcgcacaggatgctgggtagagcgcttgcgggcgcctccatacatcttggtgggcgcatacagtccccaaccggtattattactgggcgagatgagaatggacattttttttttttttagaaagtgcggcttgaaagaacgcgcggcgcgactatgcccagggccttgtaaacgtagggacaggtgcggcgtctggcgtcagtaacggtcacgcgctggactccccggatactgctgcgtaacggcagggtcccgtgatctgtgagagcaggaacgttttcactgacggtggtaattgtgggcgccggcgggcggatgaggatctggttctcagggaagcggttgaagacgtgcgtgagcgaagtggcctgtcggagctgctgagagtacacggcttgctcattgtagaaactctttgagaagacgggcataagctctgcacccaccactgggtagttgttgacttgtcttgtggagcggaaggtgactgggtcttgcatcatgtcagggagcgaccagtagacctgctctgccccacaggtgacatctgaagtggtgagcagtgtccaagaccttattcctttctcagggttaccgtaattgtaggacaggtaccaactgcggtaggctgtgttgattttgtcttccaagacattgtagcttctactcttgctgtctttttctagaggttggatctttaactcttttttaacttcagcagctgcagcttcacgtttttgtttttcagttatataggtatctcctctagttatatcatcatcttcactagtttcctctgcaacagccagtgtggttgtttcagtagtggtatcctttttgctttcctcataggcagtgacatccaaaagggcaggaatattacccccttcaagatcttcatacatgattttgaaaccctcctggaatggatgtctcttcctgatgccaagcaagttgctaagtcggctttcagtaaagtctaccccgcaaccaggcagcaatacaatgtcaggatggaatgcctcataagtgtagacacctggcataatcaacttagtttcggggtcccacccgagcctgaaatttctagtgtcaaacttaacaccaatgtcactttccagcactccattctgtctgccaatttccaggtagttgtcaatgatggcattgttcatcaggtcgatcgtcatggtggctgaaaagttgccttctggtaaaatgaactcaaaccactcatacttcaagatatcctctttatgatcataggtgtcatttactgtaacaccttcaggagcttttctggacaccatcaccctcgccttgaacttgttgctgaacatgtactcgttcacgttgggcatgttggtgtgcatgatggtcttcagctgaccgccccatcgcgaccgctcgtcaaagttgatggtctgggtgctagcctccgtgggggtaaagtcattgttctgcaccaccgtggtcaggaagttgctgtggtcgttctgatagttcagggaggcgatgtccgccgacttgttgtccaccagatacaacttggtggtatcgtacaggggcgacagctccgagtaacgaatgctgtttctcccttccgtaggcgccaggtaccgtgggggtacgaagggagcctccagtgggggctgtatcatcgccgcctgttgctgcatcacgctctcgtaagaaggaggaggaccctccggatacaccaccgctccgcctagcacggctcgtctcctcatcgtactagacacagataacaaaaaagaacgaacgcacgctcggtcgccatggccttggtgagttgcctttttattttactttcacttttacaacatgcgcccgaatctgggacgcagatgagcgaacgggttgccccctcctcttccacccaagtccaacacgctgctatcatcggcagagtcctcatcgtcccacacaagacccatctgcctgtcgtggcgctggcgtctacggatcggtctgcttgtagcccccaagatcctgggctcgtctctgtgatcctgcgcataggtcttccatctactcatcttatccaccagactctctattccattgttggggaagttcttttccctctctggcctcagcaaagagtcattcaagtactcatcctcgcccatcaagcgcgggcgggttattctccccagttcactgctgcgaacgctgtttagtgaaaagggcaagctagggaaaggacttgcagcttcgggcacggtcgcggcagcaccagccgttccggatagcgacacggaagagtgtcttctatcgcccccttccttcttccaaactgtataaccgggaggcggggaaaatatgctgctgtccacatcgtcccacaggaacccgtcattggggtcgggcatgtcgtactcgccagtgtagaaaccaggtgggggcagccagtgtgggttcaggatagcattggtgaaataatcagagttcatggcggccgccctgtgcaggtagtccagcagtttgttaatgaaaggcctgttactagcatacatgctgggctccatgtttcgagctgtcatgtccagcgcggcggtaggtgtcgccccctcctgcatcaggaacagtccaacgctctgttgcacgtatctgaggatccgctcctcctcagcggtaagcgcatactgaggagggatcttctgtgaccggttggttagcaagaagttcagggtggcttccaaactgcccgtgtcttcctgacccagggcgcggctcacttgggtgatttcttgataggtctgctcgtccacctggctctgtcctatggcctcgcgatacaggttaagcaggtagcccaagtacgagttgcggtcaatgctaccgctgtcagtaaagggggataccagcagcagcagcaggcgggagttgggagtcagcaagctagacacggtcgcgcgatcccctactggggcgtgcactccccacagacccttcaggttcttgaaagcctgagtcaggttcactgtctgcaagccctgtctgctggtctggaagaagtaatctggcccggactggtacacctcgctctggggcacctcagctaccatgagtctcaatgcactcaaaaagtttgtatagtcttgctgaccacggggcacgttggcgggctgggtgctgaggaaagcgtttagcgctaccaacgaccccaagttggcgtcgcgctggaatcgctcgcgctgagacacggcctcgcgcacatcggtcaccatccggtccaggttggtttgcacgttgctgctgttgtaacgggccacgcgctccaagagagcattgtataccagcccggcctcatcgggacggatggccttgttctccaccagcgcgttcacgatagccaggaccttctcgtgggtggggttggagcgggagggcactacggcctccagtatggcagaaaggcggttggcctggggttgctgtctaaaggcttcggggttgcgggtcgtcagcgccattatgcgttgcatggcctgggtccaatcgtccgaggagttaatgccggacggctggctctgcagcgccgcccgcattgcggggtccggtgcctgctgctgttccatctagcaaaaatacgggtcgcgccatcagtcttccaagtactcgccctcctcgtcctcgacttcatccacctcttctatgtaaggaagctcacaccctgcagcctccatggccctgcgactgggttgccattgcaaatccgctcccatgtcaaagtagttctccccatcagtcccggcccccgttagagctctttgcaagctgtgcataagttctctgtcgctcagctcgcgcctcctgctggcgctcaccgcgcggtgcatcctgtcattgcgatacacccccagatcgtcgctcagagtcagcaccttcagagtcatgcgcatgtaaaacccatctatcttcacctccttgtctatgggtacgtagggggtcttgtagatcttgcgagcgtagtatttgcccaggctcaagaccgagtagttgatagctgccactttctcagccaaacccaggctacgttcctgcactataatactttgcaggatgttgatcagatcatacagccatctcccatcaggctcggtgatgttcaacaacgcctccctgaatgcctcgttgtccctgctatgttgaaccaccagaaacagctgagctgtcagtggtttgctagtggggttttgggcgatagcctccatcaggtcccacagatgcatcagacccagggtcacttcctcgcgggcgatcagggtgcgcacatggttgttaaaagatttttggaagttgcgctcctccttcacggtctgctcgtaggccgagactaggttggccgcggccacatgtgccctagctgggctgatccctgtgacttcatcgacctcaaaatcctcgtcttgcagcacccgtcttcgatccagaccgtggcgcagctcgcgacccgcgttaaatcgagatgctcgcatctcctctggctcctcgccgctcctgtccctgaacaggttctgctggggcacgtacgcctcgcgagagtccttttttagttgcacccgcgggtgccgctcgggcgatggagcccccaggcgcgccaatccctcgccctcttccaagtccagatcataggcgggctgtcccgcgccgctcacggctgcagctgcagtagttgcaggagcaagaagagccttttgtggctgttgctgagaaggggcctgttgctgggggcgcatctgtcgcagcactggatgcatctgggcgacaaaaacaaaaaaaaaaaaaaaagggctcgctcccgtaaactggagaagtcggctggcggggtcttggaaataacggggctgccaaaccctcgcttgtcgcggaaaccggccgatacgagccgcgcttaggctccaaccggggcataccgcaacgcaaccctggcgactgattctccagactacgggcgcgagccactcacggcccgagaactgagcgttctaaagcttgacgtggcaatggcacacgtccaggaaaaagcagcaaaaacgactctactccgtaccctggatattcgtcggctgggtcgagacgggatagccaataccacgttagccgcggctccggccgatccgagcgtgatcgcttagctttggactcgaaccggggtacaccgcgacccaacccgttcacgttcccccagaccacggagtcgagccgctcatcgctttcgttttctccgtgtctacagagcgtcaatgactgcgcgcgcctcactggccagaccgtgcctaccatgaactacttcatgccgctgcgcaacatctggaaccgcgtgcgcgagttcccacgtgcatccaccaccgcctccggtatcacctggatgtccaggtacatctacggctaccaccgcctcatgctggaagacctcgcccccggagccccggctacagagcgatggcccctgtaccgccagccaccgccacactttctcattggctaccagtacctggtgcgcacctgcaacgattacatctttgacacccgcgcatactcgcgcctcaagtacaccgagctcgtgcgccctgggcaccagacagtcaactggtcagtcatggccaactgctcctacacaatcaacaccggggcctaccaccgcttcgtggactttgacgacttccaagccaccctcacccaggtgcagcaagccatcctcgccgaaagggttgtagcggacctggcacttgtccagcccatgcgcgggttcgggatcactcgcatgcatggcagagcgggcgaagaagaagtgcccgtggaacgactcatgcaagactactataaagatctggccagatgtcaggataatgcttggggaatggctcatcgcctgcgtatccaacaagccggacccaaagacctggtgctcctcgccaccatccgccgtctcaaaactgcctattttaatttcatcaccagcagcatcgtctcaccctcccaagaggaggaaggagaagaaagagagaaccccgaccgagcgtctagccgcccccgcccgcaagaaacagtgctcagcctaccttgcgattgcgactggttagacgctttcgtcgaaaggttttcagatcccgtggatcttgagacgatcaggtccttgcgcggagtacctacggggcaattgataaaatgcataatcagcgcggtgtccctgcccaacggagagcctcccagtcaccacttcagggagatgcgcggaggcgtcttcactctgagacccagggagaacggtcgtgccgtcaccgagaccatgcgccgccgccgcggagaggtcattgaaagattcatcgaccgtctgcccgtgcgccgccggcgtcgccgcgttccccctcctcctgcagccccacctgaagaggaagagatgttagtggaagaagaagagattgaggaagaaatcccaggggctttcgagcgcgaggtgcgcaccaccatcgccgaacttatccgtcttctggaagaggagttgaccgtgtccgcgcgtaactcccagttttttaactttgccgtggacttctacgaggccatggagcgcttggaagcgctgggcgatgtcagcgagatgccgctgagacgatggatcatgtatttcttcgtcaccgagcacatcgccaccacactcaactaccttttccagcgcctatgcaactatgcggtcttcacccgccacgtggagctcaacctcgcccaggtggtcatgcgcgcgagagatcccgtgggggctgtggtctacagccgcgtctggaacgaggcgggcatgaatgcattctctcaactcattgggcgcatctccaacgacctcgcggccaccgtcgagagagcgggccgcggagatcttcaagaggaagagatcgagcagttcatggccgagatcgcctaccaggacaactctggcgacgtgcaagaaatccttaggcaagccgccgtcaacgataccgagattgattctgttgaactctctttcaggttcaagctcacggggccggtagctttcacccagaggcgtcagatccaggatgtcaaccgccgcgtcgtcgcgcatgcgagtcttctcagggcgcagtaccagaacctacccgcgcgcggcgccgacgtaccactgccagccatgccgccgggtcccgagccgcccctgccgcccggtgcgcgccctcgacaccgcttctaaacatgcaagaagcaacagagccaccgccgtccaaaatgaaaaacaagggcacggtggtagcgcccaagggacacggaaccctgcaagccatcgacatctccaccaacggacccgttgagatcaagtactatctgaacctccctcacgccctccaaaagatcatgcaagttaatctcctgacactgcctactaacctgactccgcagcgtctcaggaccctggacagctccggcctgcgcgctctcgtcctcgagctccgcccctgccgcgccgaggtctggacttgcctcccgcgagggctcgtcagcatgaccaccatcgagacagaagatggtcatgccgatgcagacaacatagtaaagcgcgaggtacaagcgccaggcctcaattttccactgaaatttctcgtcaaaggaagtcaggtacaactcattcataaggtgcatcccgtgaatcgctgcgagtactgcggccgtctgtacaagcacaagcatgaatgctcggcgcgtcgcagggagttctacttccatcacatcaacagccattcctccaactggtggcaggagatccagttcttcccgattggctctcatcctcgcacagaaaggctctttctcacctacgatgtggaaacctacacctggatggggtcctttggcaagcagctaatccccttcatgctggtcatgaaactctctggagaccagcggctcgtcaacatcgcctatgacctcgccataaaactcaagtgggatcgctggcggcaggacccccaaaccttctattgcgtcaccccagaaaagatggcagtcggacagcattttcgtcagtaccgggaccagttacaaacagcactggcagtggacctctggtcctccttccttaaagcgaaccctcacgtgcacgaatgggccctcgaacactatgctctcactgaccctacagatctcacttttgaagaactcaagaagctgcctcatgtcaggggcacccctcgattcttagaactgtacatagtggggcacaacatcaatggctttgatgagatcgtcttggccgctcaggttatcaataaccgagcagaggttcctcagcctttcaaaatcacccgaaatttcatgcccagggccggcaagatcctcttcaatgatgttactttcgctttgcccaaccccgcctacaagaagcgggtggacttccaactctgggaacagggggcctgtgatgacatcgacttcaagtatcaattcctcaaagtcatggtcagggacacttttgccctcactcatacctcgctgcgcaatgcagcccaagcatactctctcccagtggagaagggatgctgtccctacaaggcagtcaatcagttctacatgttgggctcttaccgtgcagaaaaagacgggtttcccctcgaagagtactggaaggatcacgaagaataccttctcaaccgcgagctgtgggaaaagaaaagccaaccgcgttatgacatcatccaggaaactctcgactactgtgccctggatgtactcatcaccgccgagctggtagccaagctgcaagagtcatatgcccacttcataagggactctgtaggcttacctcatgcccattttaacatattccagagacctactatctcttccaattcccatgccatctttcgccagatcgtttacagggcggaaaaacccaaccgcaccaatctgggcccgggtcttcttgccccctcacatgaactctatgactatgtgcgagcaagcatcagaggggggcgatgttatcccacttacatcggcatcctcgaagagcccctctatgtctacgatatctgtggcatgtatgcctccgcgctcacccaccccatgccctggggcacccctcttaacccctatgagcgcgcgctggcagttcgagaatggcagatgaccttggatgatcccgccaccatcagctattttgacaaagatttgctaccgggaatatttaccatagatgcggacccccctgatgagttcatgctagaccccctcccccctttctgttcaagaaaaggaggtcgactctgctggaccaatgagcccctccgaggcgaggtggccaccagtgtggatctgataaccctgcacaataggggatggcgaatcagaatagttccggatgaactgacaaccatctttcctgaatggaaatgtgtggcgcgcgagtacgtccagcttaacatcaccgccaaggagcgcgcggacaaggaaaagaaccaaaccatgcgctccatcgccaagcttctatccaatgccctctatggatcatttgccaccaagctggacaacaagaagattgtgttttctgaccagatggacgagagtcttatgaaaggcatctctgctggtactgtcaatatcaaatcctcctcgttcctagaaactgacaacctgagtgcagaggtcatgcccgccttcgagagggaatacctaccccaacagctggcgctcctggacagcgatccggaagacagtgaggacgaacagaggcccgcccccttttatacccccccggcggggacccctggtcacgtggcctacacttacaagccaatcacattcttggatgtggaggagggggacatgtgtttacataccgtagagaaggtggaccccctggttgacaacgaccgctacccctcccacgtggcctcctttgtgctggcctggacacgcgcttttgtatcagagtgggctgggttcctctacgaagaggaccgaggcactccgctcgaggacaggcccataaagtcggtctacggggacacggacagcctctttgtcacccagcggggacacgaactcatggaaaccaaaggtaagaaacgcatcaaaaaacatggcggaaaacttgtttttgaccccgatgagccggatctgacctggctcgtggagtgcgaaaccgtctgcgcctcctgcggtgcggatgcatactcccccgaatccattttcctcgcgcccaagttgtatgccctcaaatgtatctactgccccgcctgccataaaacttccaaaggtaagctccgtgccaaaggccacgcggccgaggcgctcaactacgaactcatggtaaactgctacctggccgacatgcagggcgccaatcggcagcggttctcgaccagcaggatgagtctgaagcgcaccctcgcaagcgcccaaccaggcgcgcaccccttcaccgtgacggaaacaaccctgactcggacgctgcgaccatggaaggatcggaccctggcagcgctggacgcccatcgtctgattccctactccaggagccgtcccaacccgcgaaacgaggaggtctgctggatcgagatgccatagagcacatcaccgagctctgggaccggctcgagctcttgcaacagactctttccaaaatgcccatggctgacgggctgaagccgctgaaaaacttctcctcgctccaggagcttctatcccttgggggagagcgcctcctaacggacttggtgcgggaaaatatccatgtaagggaaatgatgaacgaagtggcccccctgctccgggaggacggcagctgtcgttccctaaactaccatctgcaacccgtaattggggtcatttacggtcccactgggtgcggcaagtctcagctgcttaggaatttgctctcgtcccagttaatcaccccggctccagaaacggtattttttatagccccgcaggtggacatgatccccccctctgaactgaaagcctgggaaatgcaaatatgtgagggaaactatgctcccgggccagagggaactttcatcccccaatctggcaccctccgcccaaagtttattaaaatggcttatgatgacctgactcaggagcataactatgatgtttcagacccccggaacgtgttcgcccgtgccgctgcccacggccccatcgctatcattatggatgagtgcatggagaatctggggggtcacaaaggcgtctccaaattttttcatgcttttccctctaagctgcatgataaatttcccaagtgcaccggatacactgtcttggtggtcctgcacaatatgaacccgagacgggatctaggcggcaacattgccaacctcaagatccagtccaaaatgcatataatttcaccccggatgcacccgtcccagctcaacagatttgtaaacacctacactaagggcctccccgttgcaattagtctgctcctaaaagatattgtgcaacaccatgcactccgaccttgctatgactgggtgatttataacactaccccggagcaagaggctcttcaatggagctatctccacccccgagacggactaatgcccatgtatctaaacattcaatcccacctttacagggtactggaaaagatccaccgcgttctcaatgatcgagaccgatggtccagggcataccgcgcgcgaaaaatcaaataaa

SEQ ID NO: 106 - DNA, 4102 bp, Human adenovirus
  misc_feature 1..4102: note = Human adenovirus 3, Ad3 E3
  source 1..4102: mol_type = genomic DNA
tataaaacgcctggtgattagaggccgaggtatccagctcaacgacgagtcggttagctcttcgcttggtctgcgaccagacggagtcttccaaatcgccggctgtgggagatcttccttcactcctcgtcaggctgtgctgactttggagagttcgtcctcgcagccccgctcgggcggcattggaactctccagtttgtggaggagtttactccctctgtctacttcaaccccttctccggctctcctggccagtacccggacgagttcataccaaacttcgacgcaatcagcgagtcagtggatggctatgattgatgtctaatggtggtgcggctgagctagctcgactgcgacacctagaccactgccgccgctttcgctgcttcgcccgggaactcaccgagttcatctacttcgaactctccgaggagcaccctcagggtccggcccacggagtgcggattaccatcgaagggggaatagactctcgcctgcatcgcatcttctcccagcggcccgtgctaattgaacgcgaccagggaaatacaaccatctccatctactgcatctgtaaccaccccggattgcatgaaagcctttgctgtcttgtttgtgctgagtttaataaaaactgagttaagaccctcctacggactaccgcttcttcaatcaggactttacaacaccaaccagatcttccagaagacccagacccttcctcctttcatccaggactctaactctaccttaccagcaccctccactactaaccttcccgaaacaaacaagcttgcatctcatctgcaacaccgcctttcacgaagccttctttctgccaatactaccactcccaaaaccggaggtgagctccgcggtcttcctactgacgacccctgggtggtagcgggttttgtaacgttaggagtagttgcgggtgggcttgtgctgatcctttgctacctatacacaccttgctgtgcatatttagtcatattgtgctgttggtttaagaaatgggggccatactagtcgtgcttgctttactttcgcttttgggtctgggctctgctaatctcaatcctctcgatcacgatccatgtttagacttcgacccagaaaactgcacacttacttttgcacccgacacaagccgtctctgtggagttcttattaagtgcggatgggactgcaggtccgttgaaattacacataataacaaaacatggaacaataccttatccaccacatgggagccaggagttccccagtggtatactgtctctgtccgaggtcctgacggttccatccgcattagtaacaacactttcattttttctgaaatgtgcgatctggccatgttcatgagcagacagtatgacctatggcctcccagcaaagagaacattgtggcattttccattgcttattgcttggtaacatgcatcatcactgctatcatttgtgtgtgcatacacttgcttatagttattcgccctagacaaagcaatgaggaaaaagagaaaatgccttaacctttttcctcataccttttctttacagcatggcttctgttacagctctaattattgccagcattgtcactgtcgctcacgggcaaacaattgtccatattaccttaggacataatcacactcttgtagggcccccaattacttcagaggttatttggaccaaacttggaagtgttgattattttgatataatttgcaacaaaactaaaccaatatttgtaatctgtaacagacaaaatctcacgttaattaatgttagcaaaatttataacggttactattatggttatgacagatccagtagtcaatataaaaattacttagttcgcataactcagcccaaattaacagtgccaactatgacaataattaaaatggctaataaagcattagaaaattttacatcaccaacaacacccaatgaaaaaaacattccaaattcaatgattgcaattattgcggcggtggcattgggaatggcactaataataatatgcatgctcctatatgcttgttactataaaaagtttcaacataaacaggatccactactaaattttaacatttaattttttatacagatgatttccactacaatttttatcattactagccttgcagctgtaacttatggccgttcacacctaactgtacctgttggctcaacatgtacactacaaggaccccaagaaggctatgtcacttggtggagaatatatgataatggagggttcgctagaccatgtgatcagcctggtacaaaattttcatgcaacggaagagacttgaccattattaacataacatcaaatgagcaaggcttctattatggaaccaactataaaaatagtttagattacaacattattgtagtgccagccaccacttctgctccccgcaaatccactttctctagcagcagtgccaaagcaagcacaattcctaaaacagcttctgctatgttaaagcttccaaaaatcgctttaagtaattccacagccgctcccaatacaattcctaaatcaacaattggcatcattactgccgtggtagtgggattaatgattatatttttgtgtataatgtactacgcctgctgctatagaaaacatgaacaaaaaggtgatgcattactaaattttgatatttaattttttatagaattatgatattgtttcaatcaaataccactacctcctatgcatacacaaacattcagcctaaatacgctatgcaactagaaatcacaatactaattgtaattggaattcttatactatctgttattctttattttatattctgccgtcaaatacccaatgttcatagaaattctaaaagacgtcccatctattctcctatgattagtcgtccccatatggctctgaatgaaatctaagatctttttttttttctcttacagtatggtgaacatcaatcatgatccctagaaatttcttcttcaccatactcatctgtgcttttaatgtctgtgctactttcacagcagtagccactgcaagcccagactgtataggaccatttgcttcctatgcactttttgccttcgttacttgcatctgcgtgtgtagcatagtctgcctggttattaattttttccaactggtagactggatctttgtgcgaattgcctacctacgtcaccatcccgaataccgcaatcaaaatgttgcggcacttcttaggcttatttaaaaccatgcaggctatgctaccagtcattttaattttgctactaccctgcattcccctagcttccaccgccactcgcgctacacctgaacaacttagaaaatgcaaatttcaacaaccatggtcatttcttgattgctaccatgaaaaatctgattttcccacatactggatagtgattgttggaataattaacatactttcatgtacctttttctcaatcacaatataccccacatttaattttgggtggaattctcccaatgcactgggttacccacaagaaccagatgaacatattccactacaacacatacaacaaccactagcactggtacagtatgaaaatgagccacaaccttcactgccccctgccattagttacttcaacctaaccggcggagatgactgacccaatcgccacatcatccaccgctgccaaggagctgctggacatggacggacgtgcctcagaacagcgactcatccaactacgcattcgtcagcagcaggaacgagcagtaaaagagctaagggatgccattgggattcaccagtgcaaaaaaggcatattctgcttagtaaaacaatccaaaatctcctacgagatcaccgctactgaccatcgtctctcatacgagctcggtccgcagcgacaaaaattcacctgcatggtgggaatcaaccccatagttatcacccagcagtctggagatactaagggttgtatccagtgttcctgtgattccaccgagtgcatctacacactgctgaagaccctctgcggccttcgagacctcctacccatgaactaatcattgcccctaccttacccaatcaaaatattaataaa

SEQ ID NO: 107 - DNA, 960 bp, Human adenovirus
  misc_feature 1..960: note = Human adenovirus 3, Ad3 fiber
  source 1..960: mol_type = genomic DNA
atggccaagcgagctcggctaagcacttccttcaacccggtgtacccttatgaagatgaaagcagctcacaacacccatttataaatcctggtttcatttcccctgacgggttcacacaaagtccaaacggggttttaagtcttaaatgtgttaatccacttaccactgcaagcggctccctccaacttaaagtgggaagtggtcttacagtagacactactgatggatccttagaagaaaacatcaaagttaacacccccctaacaaagtcaaaccattctataaatttaccaataggaaacggtttgcaaatagaacaaaacaaactttgcagtaaactcggaaatggtcttacatttgactcttccaattctattgcactgaaaaataacactttatggacaggtccaaaaccagaagccaactgcataattgaatacgggaaacaaaacccagatagcaaactaactttaatccttgtaaaaaatggaggaattgttaatggatatgtaacgctaatgggagcctcagactacgttaacaccttatttaaaaacaaaaatgtctccattaatgtagaactatactttgatgccactggtcatatattaccagactcatcttctcttaaaacagatctagaactaaaatacaagcaaaccgctgactttagtgcaagaggttttatgccaagtactacagcgtatccatttgtccttcctaatgcgggaacacataatgaaaattatatttttggtcaatgctactacaaagcaagcgatggtgccctttttccgttggaagttactgttatgcttaataaacgcctgccagatagtcgcacatcctatgttatgacttttttatggtccttgaatgctggtctagctccagaaactactcaggcaaccctcataacctccccatttaccttttcctatattagagaagatgactga

SEQ ID NO: 108 - DNA, 126 bp, Human adenovirus
  misc_feature 1..126: note = Human adenovirus 3, Ad3 fiber tail
  source 1..126: mol_type = genomic DNA
atggccaagcgagctcggctaagcacttccttcaacccggtgtacccttatgaagatgaaagcagctcacaacacccatttataaatcctggtttcatttcccctgacgggttcacacaaagtcca

SEQ ID NO: 109 - DNA, 270 bp, Human adenovirus
  misc_feature 1..270: note = Human adenovirus 3, Ad3 fiber shaft
  source 1..270: mol_type = genomic DNA
aacggggttttaagtcttaaatgtgttaatccacttaccactgcaagcggctccctccaacttaaagtgggaagtggtcttacagtagacactactgatggatccttagaagaaaacatcaaagttaacacccccctaacaaagtcaaaccattctataaatttaccaataggaaacggtttgcaaatagaacaaaacaaactttgcagtaaactcggaaatggtcttacatttgactcttccaattctattgcactgaaaaataacact

SEQ ID NO: 110 - DNA, 561 bp, Human adenovirus
  misc_feature 1..561: note = Human adenovirus 3, Ad3 fiber knob
  source 1..561: mol_type = genomic DNA
ttatggacaggtccaaaaccagaagccaactgcataattgaatacgggaaacaaaacccagatagcaaactaactttaatccttgtaaaaaatggaggaattgttaatggatatgtaacgctaatgggagcctcagactacgttaacaccttatttaaaaacaaaaatgtctccattaatgtagaactatactttgatgccactggtcatatattaccagactcatcttctcttaaaacagatctagaactaaaatacaagcaaaccgctgactttagtgcaagaggttttatgccaagtactacagcgtatccatttgtccttcctaatgcgggaacacataatgaaaattatatttttggtcaatgctactacaaagcaagcgatggtgccctttttccgttggaagttactgttatgcttaataaacgcctgccagatagtcgcacatcctatgttatgacttttttatggtccttgaatgctggtctagctccagaaactactcaggcaaccctcataacctccccatttaccttttcctatattagagaagatgac

SEQ ID NO: 111 - DNA, 1635 bp, Human adenovirus
  misc_feature 1..1635: note = Human adenovirus 3, Ad3 penton
  source 1..1635: mol_type = genomic DNA
atgaggagacgagccgtgctaggcggagcggtggtgtatccggagggtcctcctccttcttacgagagcgtgatgcagcaacaggcggcgatgatacagcccccactggaggctcccttcgtacccccacggtacctggcgcctacggaagggagaaacagcattcgttactcggagctgtcgcccctgtacgataccaccaagttgtatctggtggacaacaagtcggcggacatcgcctccctgaactatcagaacgaccacagcaacttcctgaccacggtggtgcagaacaatgactttacccccacggaggctagcacccagaccatcaactttgacgagcggtcgcgatggggcggtcagctgaagaccatcatgcacaccaacatgcccaacgtgaacgagtacatgttcagcaacaagttcaaggcgagggtgatggtgtccagaaaagctcctgaaggtgttacagtaaatgacacctatgatcataaagaggatatcttgaagtatgagtggtttgagttcattttaccagaaggcaacttttcagccaccatgacgatcgacctgatgaacaatgccatcattgacaactacctggaaattggcagacagaatggagtgctggaaagtgacattggtgttaagtttgacactagaaatttcaggctcgggtgggaccccgaaactaagttgattatgccaggtgtctacacttatgaggcattccatcctgacattgtattgctgcctggttgcggggtagactttactgaaagccgacttagcaacttgcttggcatcaggaagagacatccattccaggagggtttcaaaatcatgtatgaagatcttgaagggggtaatattcctgcccttttggatgtcactgcctatgaggaaagcaaaaaggataccactactgaaacaaccacactggctgttgcagaggaaactagtgaagatgatgatataactagaggagatacctatataactgaaaaacaaaaacgtgaagctgcagctgctgaagttaaaaaagagttaaagatccaacctctagaaaaagacagcaagagtagaagctacaatgtcttggaagacaaaatcaacacagcctaccgcagttggtacctgtcctacaattacggtaaccctgagaaaggaataaggtcttggacactgctcaccacttcagatgtcacctgtggggcagagcaggtctactggtcgctccctgacatgatgcaagacccagtcaccttccgctccacaagacaagtcaacaactacccagtggtgggtgcagagcttatgcccgtcttctcaaagagtttctacaatgagcaagccgtgtactctcagcagctccgacaggccacttcgctcacgcacgtcttcaaccgcttccctgagaaccagatcctcatccgcccgccggcgcccacaattaccaccgtcagtgaaaacgttcctgctctcacagatcacgggaccctgccgttacgcagcagtatccggggagtccagcgcgtgaccgttactgacgccagacgccgcacctgtccctacgtttacaaggccctgggcatagtcgcgccgcgcgttctttcaagccgcactttctaa

SEQ ID NO: 112 - DNA, 2835 bp, Human adenovirus
  misc_feature 1..2835: note = Human adenovirus 3, Ad3 hexon
  source 1..2835: mol_type = genomic DNA
atggccaccccatcgatgatgccccaatgggcatacatgcacatcgccggacaggatgcttcggagtacctcagtccgggtctggtgcagttcgcccgtgcaacagacacctacttcagtatggggaacaaatttagaaaccccacagtggcgcccacccacgatgtgaccaccgaccgtagccagcgcctgatgctgcgcttcgtgcccgttgaccgggaagacaatacctactcttacaaagttcgctacacgctggctgtaggcgacaacagagtgcttgacatggccagcacattctttgacattcggggggtgcttgatagaggtcctagcttcaagccatattccggcacagcttacaattcactcgctcctaagggcgcgcccaatacatctcagtggatagttacaacaaatggggacaatgcagtaactaccaccacaaacacatttggcattgcttccatgaagggagacaatattactaaagaaggtttgcaaattgggaaagacattaccactactgaaggagaagaaaagcccatttatgccgataaaacatatcagccagagcctcaagttggagaagaatcatggactgatactgatggaacaaatgaaaagtttggtggaagagcccttaaaccagctaccaacatgaagccatgctacgggtcttttgcaagacctacaaacataaaagggggccaagctaaaaacagaaaagtaaaaccaacaaccgaaggaggggttgaaactgaggaaccagatattgatatggaatttttcgatggtagagatgctgttgcaggagctttagcgcctgaaattgtgctttatacggaaaatgtaaatttggaaactccagacagtcatgtggtatataaaccagaaacgtctaataactctcatgcaaatttgggtcaacaagccatgcctaacagacccaattacattggcttcagggataacttcgtaggcctaatgtactacaacagtactggaaatatgggagttttggctggccaagcatcacaactgaatgcagtggttgacttgcaggacagaaatactgaactgtcatatcagcttttgcttgattctctgggagacagaaccagatacttcagcatgtggaatcaggctgtggacagttacgatcccgatgttcgcattattgaaaatcatggcatcgaggatgaactgcctaattactgttttcctctgaatggcataggaccagggcacacatatcaaggcattaaagttaaaaccgatgacactaatggatgggaaaaagatgctaatgttgctccagctaatgaaataaccataggcaacaacctggctatggaaattaatatccaagctaacctttggagaagttttctgtactctaatgtggctttgtaccttccagatgtttacaagtacacgccacctaacattactttgcccactaacaccaacacctatgagtacatgaacgggcgagtggtatccccatccctggttgattcatacatcaacattggcgccaggtggtctcttgacccaatggacaatgtgaatccattcaaccaccaccgcaatgctggtctgcgctacaggtccatgcttctgggaaatggtcgttatgtgcctttccacatacaagtgcctcagaaattctttgctgtcaagaacctacttcttctacctggctcctacacctacgagtggaacttccgaaaggatgtgaacatggtcctgcaaagttcccttggaaatgacctcagaacggatggtgctaccataagtttcaccagcatcaatctctatgccaccttcttccccatggctcacaacacagcttccacccttgaagccatgctgcgcaacgataccaatgatcagtcatttaacgactacctctctgcagctaacatgctttaccccattcctgccaatgcaaccaacattccaatttccatcccatctcgcaactgggcagccttcaggggctggtccttcaccagactcaaaaccaaggagactccatctcttggatcagggttcgatccctacttcgtatattctggatctattccctacctggatggcaccttttaccttaaccacactttcaagaaggtctccatcatgtttgactcctcagtcagctggcctggcaatgacaggctgttgagtccaaatgagtttgaaatcaagcgcactgtggacggggaaggatacaacgtggcacaatgcaacatgaccaaagactggttcctggttcagatgcttgccaattacaacattggctaccagggcttttacatccctgagggatacaaggatcgcatgtactcctttttcagaaacttccagcctatgagcaggcaggtggttgatgaggttaattacactgactacaaagccgtcaccttaccataccaacacaacaactctggctttgtagggtaccttgcacctactatgagacaaggggaaccttacccagccaattatccatacccgctcatcggaactactgccgttaagagtgtcacccagaaaaagttcctgtgcgacaggaccatgtggcgcattcccttctccagcaacttcatgtccatgggggcccttaccgacctgggacagaacatgctctatgccaactcagcccatgcgctggacatgacttttgaggtggatcccatggatgagcccaccctgctttatcttcttttcgaagtcttcgacgtggtcagagtgcaccagccacaccgcggcgtcatcgaggccgtctacctgcgcacaccgttctcggccggcaacgccaccacataa

SEQ ID NO: 113 - protein, 319 aa, Human adenovirus; identical to SEQ ID NO: 61
  REGION 1..319: note = misc_feature - Human adenovirus 3, Ad3 fiber

SEQ ID NO: 114 - protein, 90 aa, Human adenovirus
  REGION 1..90: note = misc_feature - Human adenovirus 3, Ad3 fiber shaft
NGVLSLKCVNPLTTASGSLQLKVGSGLTVDTTDGSLEENIKVNTPLTKSNHSINLPIGNGLQIEQNKLCSKLGNGLTFDSSNSIALKNNT

SEQ ID NO: 115 - protein, 186 aa, Human adenovirus
  REGION 1..186: note = misc_feature - Human adenovirus 3, Ad3 fiber knob
WTGPKPEANCIIEYGKQNPDSKLTLILVKNGGIVNGYVTLMGASDYVNTLFKNKNVSINVELYFDATGHILPDSSSLKTDLELKYKQTADFSARGFMPSTTAYPFVLPNAGTHNENYIFGQCYYKASDGALFPLEVTVMLNKRLPDSRTSYVMTFLWSLNAGLAPETTQATLITSPFTFSYIREDD

SEQ ID NO: 116 - protein, 544 aa, Human adenovirus; identical to SEQ ID NO: 62
  REGION 1..544: note = misc_feature - Human adenovirus 3, Ad3 penton

SEQ ID NO: 117 - protein, 944 aa, Human adenovirus; identical to SEQ ID NO: 63
  REGION 1..944: note = misc_feature - Human adenovirus 3, Ad3 hexon

SEQ ID NO: 118 - protein, 42 aa, Human adenovirus
  REGION 1..42: note = misc_feature - Human adenovirus 3, Ad3 fiber tail
MAKRARLSTSFNPVYPYEDESSSQHPFINPGFISPDGFTQSP

SEQ ID NO: 119 - DNA, 136 bp, Human adenovirus
  misc_feature 1..136: note = Human adenovirus 7, Ad7 5? (left) ITR
  source 1..136: mol_type = genomic DNA
catcatcaataatataccttatagatggaatggtgccaatatgtaaatgagggaatttaaaaaagtgcgcgctgtgtggtgattggctgtggggtgaacggctaaaatgggcggggcggccgtgggaaaatgacgt

SEQ ID NO: 120 - DNA, 136 bp, Human adenovirus
  misc_feature 1..136: note = Human adenovirus 7, Ad7 3? (right) ITR
  source 1..136: mol_type = genomic DNA
acgtcattttcccacggccgccccgcccattttagccgttcaccccacagccaatcaccacacagcgcgcacttttttaaattccctcatttacatattggcaccattccatctataaggtatattattgatgatg

SEQ ID NO: 121 - DNA, 343 bp, Human adenovirus
  misc_feature 1..343: note = Human adenovirus 7, Ad7 Packaging Sequence
  source 1..343: mol_type = genomic DNA
gacttatgtgggaggagctatgttgcaagttattgcggtaaatgtgacgtaaaacgaggtgtggtttgaacacggaagtagacagttttcccacgcttactgacaggatatgaggtagttttgggcggatgcaagtaaaaattctccatttttgcgcgaaaactgaatgaggaagtgaatttctgagtcatttcgcggttatgacagggtggagtatttgccgagggccgagtagactttgaccgtttacgtggaggtttcgattaccgtgtttttcacctaaatttccgcgtacggtgtcaaagtcctgtgtttttacgtaggtgtcagctgatcgctaggg

SEQ ID NO: 122 - DNA, 3439 bp, Human adenovirus
  misc_feature 1..3439: note = Human adenovirus 7, Ad7 E1
  source 1..3439: mol_type = genomic DNA
tatttaaacctgacgagttccgtcaagaggccactcttgagtgccagcgagaagagttttctcctccgcgccgcaagtcagttctgcgctttgaaaatgagacacctgcgtttcctgccacaggagattatctccagtgagaccgggatcgaaatactggagtttgtggtaaataccctaatgggagacgacccggaaccgccagtgcagcctttcgatccacctacgctgcacgatctgtatgatttagaggtagacgggcctgaggatcccaatgaggaagctgtgaatgggttttttactgattctatgctgctagctgccgatgaaggattggacataaaccctcctcctgagacccttgttaccccaggggtggttgtggaaagcggcagaggtgggaaaaaattgcctgatctgggagcagctgaaatggacttgcgttgttatgaagagggttttcctccgagtgatgatgaagatggggaaactgagcagtccatccataccgcagtgaatgagggagtaaaagctgccagcgatgtttttaagttggactgtccggagctgcctggacatggctgtaagtcttgtgaatttcacaggaataacactggaatgaaagaactattgtgctcgctttgctatatgagaatgcactgccactttatttacagtaagtgtatttaagtgaaatttaaaggaatagtgtagctgtttaataactgttgaatggtagatttatgttttttacttgtgattttttgtaggtcctgtgtctgatgatgagtcaccttctcctgattcaactacctcacctcctgaaattcaggcgcccgcacctgcaaacgtatgcaagcccattcctgtaaagcctaagcctgggaaacgccctgctgtggataagcttgaggacttgttggagggtggggatggacctttggaccttagtacccggaaactgccaaggcaataagtgccctgcagctgtgtttatttaatgtgacgtcatgtaataaaattatgtcagctgctgagtgttttattacttcttgggtggggacttggatatataagtaggagcagatctgtgtggttagctcacagcaacctgctgccatccatggaggtttgggctatcttggaagacctcagacagactaggctactgctagaaaacgcctcggacggagtctctggcctttggagattctggttcggtggtgatctagctaggctagtgtttaggataaaacaggactacagcgtagaatttgaaaagttattggacgacagtccaggactttttgaagctcttaacttgggtcatcaggctcattttaaggagaaggttttatcagttttagatttttctactcctggtagaactgctgctgctgtagcttttcttacttttatattggataaatggatccgccaaactcacttcagcaagggatacgttttggatttcatagcagcagctttgtggagaacatggaaggctcgcaggatgaggacaatcttagattactggccagtgcagcctctaggagtagcagggatactgagacacccaccgaccatgccagcggttctgcaggaggagcagcaggaggacaatccgagagccggcctggaccctccggtggaggagtagctgacctgtttcctgaactgcgacgggtgcttactaggtctacgaccagtggacagaacagaggcattaagagggagaggaatcctagtgggaataattcaagaaccgagttggctttaagtttaatgagccgcaggcgtcctgaaactgtttggtggcatgaggttcagagcgaaggcagggatgaagtttcaatattgcaggagaaatattcactagaacaacttaagacctgttggttggaacctgaggatgattgggaggtggccattaggaattatgctaagatatctctgaggcctgataaacaatatagaattactaagaagattaatattagaaatgcatgctacatatcagggaatggggcagaggttataatagatacacaagataaagcagcttttagatgttgtatgatgggtatgtggccaggggttgtcggcatggaagcagtaacacttatgaatattaggtttagaggggatgggtataatggcattgtatttatggctaacactaagctgattctacatggttgtagcttttttgggtttaataatacgtgtgtagaagcttgggggcaagttagtgtgaggggttgtagtttttatgcatgctggattgcaacatcaggtagggtcaagagtcagttgtctgtgaagaaatgcatgtttgagagatgtaatcttggcatactgaatgaaggtgaagcaaggatccgccactgcgcagctacagaaactggctgcttcattctaataaagggaaatgccagtgtgaagcataatatgatctgtggacattcggatgagaggccttatcagatgctgacctgcgctggtggacattgcaatattcttgctactgtgcatatcgtttcacatgcacgcaagaaatggcctgtatttgaacataatgtgattaccaagtgcaccatgcacataggtggtcgcaggggaatgtttatgccttaccagtgtaacatgaatcatgtgaaggtaatgttggaaccagatgccttttccagagtgagcttaacaggaatctttgatatgaatattcaactatggaagatcctgagatatgatgacactaaaccgagggtgcgcgcatgcgaatgcggaggcaagcatgctagattccagccggtgtgcgtggatgtgactgaagacctgagacccgatcatttggtgcttgcctgcactggagcggagttcggttccagtggtgaagaaactgactaaagtgagtagtggggcaagatgtggatggggactttcaggttggtaaggtggacagattgggtaaattttgttaatttctgtcttgcagctgccatgagtggaagcgcttcttttgaggggggagtatttagcccttatctgacgggcaggctcccaccatgggcaggagttcgtcagaatgtcatgggatccactgtggatgggagacccgtccagcccgccaattcctcaacgctgacctatgccactttgagttcgtcaccattggatgcagctgcagccgccgccgctactgctgccgccaacactatccttggaatgggctattacggaagcatcgttgccaattccagttcctctaataacccttcaaccctggctgaggacaagctacttgttctgttggctcagctcgaggccttaacccaacgcttaggcgaactgtctaagcaggtggcccagttgcgtgagcaaactgagtctgctgttgctacagcaaagtctaaataaagatctcaaatcaataaataaa

SEQ ID NO: 123 - DNA, 22609 bp, Human adenovirus
  misc_feature 1..22609: note = Human adenovirus 7, Ad7 E2
  source 1..22609: mol_type = genomic DNA
tttaagagtcagcgcgcagtacttgttgaagagagcctcggcgtcctccagagtgcgctgaagttggtcttcgctcttgtgatacaaacaacttctggtgagcgagcgcagagatcggttttttactttcagttcctgctcttgcccccgactctgctggaagatggcatagagggttggaaagatccggttcctcagctctctggtctgcgctggctcgttcgctgtgatcctcagtcctcctcctgctgcacttgttgtagattttctaactgctggttttctggtcaccgttgtcgctgctgtctttttctgtcggggttgccgggacttgctgactgcagtaggggctgtggaggtgacggtagtaatgcaagatattgcgggggaagttcacaccgtggtggaagagcaggtatcgccgggtgaaggatatgttgcccccgcattcatgcaagcaggagatgatagcgtttttgtgtccacgccaggacttgtatccctgtcgctccttcttaccggttttggaagcggtggtcgggtttgggaatcgcccggtctcgtcccatctactgttgggccgccgctggaccccccgacccggagcggagatggtagccgtgctgctgtctggggacttgcttgtctccgccgccgatgacaactgtttggcggcggttgcttcttccacctcctctgcctcctcgtcttcctcctccaaactgtcttcctccaggctgtccacctcctctgcctggctgtcccaatcttccatctcctcctctgcctgactgtcccagtcttcctccatatcctctgggggcgtcagctgcaccttcagcttcttgcttcctcggcgatgggacatcctgggggaaccttgtgttgagctcctcaccggtctgggggtcaaggtagaccccgcttccctttttcagtagaaattcttggcgggatttttggatggcttgcaattgggccagaattgctccctgggtgatgacgcaggctgagagctcgactttgggaggatgtgactggtcctcatagaacctgatctcataggggtggtaatcctcgggatgaaacttgcgcaggtaggcggaggtccacagccccggtgtcagtttcagactctgccccggagaagacccctcgccttcactgctgggaccctgcaactcgaaggtgccgatgatctgggtctcgctcagcaactgggggttgcaggcaagggagcggtggggtgtgcaaagattgcagcggcagtggcattccagcagaccgtctccgctcacatcctctataacatccgagtggtaggagaggtagttggccaggcggaacaggtagcagtggctccatagcggcggtgggcactcgcggtaggtgagaggcacaaagtcggagggcagcgcacagcaggtggcaggcaggataccggagcgttccaggatgaaagagcgaaagttgttaagcatgctctggctcataaagtctggcaggccgtttcgcagagtaaccctgagacgctcggggaagatgatgtctgccaggtccgaggcgacggtgcgctcatcaaaacctgtccacagggctttgagggatctctgcaagagcttgtccagctcttttaggttctgctcttccaaacactgttgccacacacccatgccagtctgccaggtatggcagaggtaaaggtagacacagtctcggatgtagtcacggcgggcctcccctttaagggtggtgtgcaggacgctctgccctagccggttctcatgcaaaatgcccatgtaagaaaccaggttggtaagctccacgttggagatcttgcatgcctgccgcacgaagccatgtctaaaggtgtagtgcaggttctcctctagcttgcgcagggtctcagggtcggtgaaaaagcggcgcagacactccagctccacagttactagcactacagccatcataagcttgcgcctctcttccaaatctcggggggagttggtacccagccagcgagatagctgctcgtcactgactaccggcttgccctcgtccgaggcgtctggatcctgcatgttctggttttctgaaaggggtcttgctcgtttgatgagcagatggtccataacagcgctcataactttggggggcaggttaacagcggggtaggcaaaatgggtgaccacgatactgcgcttgagcactgcaagccgggcattgtcaccctccagttccactaaagcgctgtgatgttcatccatgccattctctccctgttgcagagcatttgcggcccgagtctcatcacttcccagaccctcaaagatttttggaacctcttccaaggaagctatatcaggtaagcgagctcccggacccaagttgagaagggcatcggcgcgggtgcggttggcgcggcaggagactggaatcttttggttcttaaaaaagatgtggtaggtggccagcacttcggggacagtaaaagctggatagaagttcagtcgagggttggcctcgcaggtgccgtttggctgccgcttggggggtatgtgaggcgaaaagaggttcagctcgtaggcgcggctaagctcttccacactgatgggcacttcggtgaggtcgagtagtgcgtctttaactatgttggactgccttgctagatgtttgaggagcacgtcttcccccccaagcccggtgaggtagtcggcaacttgatccccgatgccagcctcctggtgatcgccatctgcttgatgctctgggcggtcgtcatcctctctgtctagaaaacgtttcagctcctcctcgtgctccgccggtgtcacatagcccgggtcctgctcgacatctgcctcaatctcttccgctttcacattatcctgcgcctgcatctcctgggctgcgtcgacctcctcctcctcatcatcgagggtagaggtggtggtagctggactgggtggtggggtggttaagctctcctcctcgtcgctgctgggggcgaggtgtgatggcgcttgcagcgatgttggcagtgatggctgagtttccatgtctgttgtttctctgcctaggagaacacaatggccagccgcggaggaaatcagtcaagcgaccgccaacgggagcacacccccgaacgcggaatgggctctgccagccatccgcttccaaggccagaccgcagcccatctcagtcgcctccacctctgcccccgaagaggaacacctaccgtcgcgtggggtccgattcttctatcgagagccaggtggtactggtaagcgaaacttcgcggtcatccctgtctccggaacggagcaacagtcctcccccgatccctcccaagaagaagcccagaaagaccaagcatgtccctctgcaagacatcggccacgacagcgaagaagaaagagaacaggctcagttggtggccgtgggcttcagctaccccccggtgcgcatcattgagaaggatggcaagagaagtgttgagaagatcgacaagaatgaccctatagctaaaggagctacttctattgctgttaggaatcctttgagcttgcccctggtatctgcctgggagaagggcatggaagtgatggctgtgctaatggagaggtacaggctggataatgacctgagaacctctttcaagctgatgccagagcagcacgagcagtacaagcgtatctgccaccagtatgtgaacgaggagcaccgtggcatcccgctgacatttagtagcatgaagaccctgacagtgatgatgggaagattcatgcagggattggtacattcttattctgagatcgcccacaatagttgggagtgcaccgggtgcgctctgtgggctcatggatgcaccgattatgaaggcaaggtgaaatgcctgcatggcactatcatgattcagaaggaccacattatcgagatggatgtggcgagcgagaacggacagcgcgctatgaaggagaacccagacagagccaagatcacccagaaccgctggggcagaaatgtggtccagttggccaacaacgatgcccgctgctgtgtaaatgatgccaactgtgctactaatcaattttccagcaagtcctgtgggatgttctataccgagggaagtaaggctcaggaagctttcaagcagtacgaagccttcatgaaggccgtgtacccagggataacccccgaccaagccaggatgatgctgatccccattcattgcgattgcaaccacaagccaggctgcgctcccgtgatgggcaggcagacctgtaagatgaccccctttgggatggccaatgctgaagacttggatgtgactaccatcagtgacccgaccgtgctggcaagcgtgagacacccagccttgatggtgttccagtgttgcaacccagtgtaccgcaactcccgtgtccagaatgccggtcccaactgtgatttcaagatctctgctcctgacctacttggcgccctgcagctgaccagaaagttgtggcaagacacctttcccgagattccagttcccaagttggtgatccccgagttcaagtggcagaacaggttacagttccgcaacgtatccctgcccgcgggtcactttgactcccgccagaacccatttgatttctgagtgaataatgaaaacgaatgagtaaaaaacgagagccttagtgcatgtaaaaataaagtgctttttattgaacacggttttacatgacttattgcatatccatacggtcaaacgcggtggccctttcgatgcgtgcgcggtgagaacgaaagtaagatgagtgggtgtttaggaagcgatatagcgcctcctggttgcggcgcagggtgggctgcacttggggagattggagcatgctgttgggcaccccagtcagcaacttcatggtggggtttccgttcatggggcggtcgggccagtgcacaaaggcatgaaggaacatacagcaaaaaagtccacaggcggctgagcgtgggccctgcacgctctgggtggacttttccagggtgatgcagcggtctttggtagcaagggcactgcggcgcaggagcccctcgtactcaaactggtaaatctgtttgagtcgctcatccgagaacccaaaaggatcaaaaaggtagcaggtgttggagcgcgggttccaaccaaaagccagccagtgctctccccccgtctcgcgtccggcagtgttgactatggcgcaggcgagcttgtcgggggccatgaaccccgggaaacgcttgtcaaaggttcccaggaaatagggtccgcaacccaggtctcggacgatggctttgagctcttgctcgctggagccgtttccggacccgcatgacatggctgcagctgctgcttgcaagaagcaagaggcttcttatgtggtggcgttgccggccgagaacggtgtgcgcaggtagacggcctcgatgacgccgcggtgtggctggtgcactctgaccacgtcgaagacttcgaaaagaagataaagcagggtgggctcatccatgggatccacctcaaaagtcatgtccagcgcatgggccgagttggcatagagcaggttctgtcccaggtccgtaagggctcccatggacatgaagttgctggagaacggtatgcgccacatggtcctgtcgcacaggaactttttttgggtaacacttttaacggcagtagttccgatgagcgggtatggataattggctgggtaaggttccccttgtctcatagtaggcgcaaggtatcctacaaagccagagttgttgtgttgatatggtaaggtgacggctttgtagtcagtgtaattaacctcatcaaccacctgcctgctcataggctggaagtttctgaaaaaggagtacatgcgatccttgtatccctcagggatgtaaaagccctggtagccaatgttgtagttggcaagcatctgaaccaggaaccagtctttggtcatgttgcattgggccacattgtatccttccccatccacagtgcgcttgatttcaaactcatttggagacaacagcctgtcattgccaggccagctgactgaggagtcaaacatgatggagaccttcttgaaagtgtggttaaggtaaaaagtgccatccaggtagggaatagatccagaataaacgaagtagggatcgaaccctgatccaagagatggagtctccttggttttgagtctggtgaaggaccagcccctgaaggctgcccagttgcgagatgggatggaaattggaatgttggttgcattggcagggatggggtaaagcatgttagctgcagagaggtagtcgttgaatgactgatcattggtatcgttgcgcagcatggcttcaagagttgaagcggtgttgtgagccatggggaagaaggtggcatagaggttgatgctggtgaaacttatggtagcaccatctgttctgaggtcatttccaagggaactttgcaggaccatgttcacatcctttctgaagttccactcataggtgtaggagccaggtagaagaagtaggttcttgacagcaaagaatttttgaggcacttgtatgtggaaaggcacataacggccattgcccagaagcatggaccggtagcgtaggccagcattgcggtggtggttaaatggattcacattgtccattgggtcaagagaccacctggcgccaatgttgatgtatgaatcgaccagagatggggaaaccactcgcccgttcatgtactcataggtgttggtgttagcgggcagagtaatgttagttggcgtgtacttgtaaacatctggaaggtacaaagccacattggagtacagaaaacttctccaaagattagcttggatattaatttccatagccagattgttgcctatggctatttcattagctgtataaactttagtatctttttcccatgcagtgtctctaggtttaatgccttgatatttgttccctggtcctatgccatccagaggaaaacagtaattaggcagttcatcctcgacgccatgattttcaataatacgaacatcgggatcatagctgtccacagcctgattccacatgctgaagtatctgcttctgtctcccagagaatcaagcaaaagctgatatgacagttcagtgtttctgtcctgcaagtcaaccactgcattcagttgtgatgcttggccggccaaaactcccatatttccagtactgttgtagtacataagacctacaaagttatccctgaagccaatgtaattgggtctgttaggcatggcttgttgacccaaatttgcatgagagttaccatcagaagttcctggcttgtataccacatggctgtctggagtttccaaattgacattttccgtgtaaagcacaatttcaggcgaaaaagcgtcagcagcttctctaccatcgaaaaattccatatcaatatctggctcctcagcttcaacatctccttcggttggtgttacttttctgtttttagcttggcccccttttatgtttgtaggtcttgcaaaagacccgtagcatggcttcattttagtagctggtttaagagctctacctccaaatttttcatttgttccatcaatatcagtccatgattcttctccaacttgaggctctggctgatatgttttatcggcataaatgggcttgttgtctgcagtaatgtctttcccaatttctaaaccttccttagtaatattgtctcccttcgtggaagcaatgccaaatgtgtatgtggtggcattgtcttctcccgttgtaactatccactgagatgtgttaggcgcgcccttaggagccagtgaattgtaagctgtgccggaatatggcttgaagctaggacctctatcaagcacccccctaatgtcaaagaatgtgctggccatgtcaagcactctgttgtcgcccacggcgagggtgtaccgcactttgtaagagtatgtattgtcctcccggtcaacgggcacgaagcgcagcatcagtcgctggctacggtcggtggtcacatcgtgggtgggcgccactgtggggtttctaaacttgttccccatactgaagtaggtgtctgttgcacgggcgaactgcaccagacccggactcaggtactccgaagcatcctgtccggcgatgtgcatgtatgcccattggggcatcatcgatggggtggccatcttgaaagcaactcagcctcggcgcgcgacctcttcctttctcctctgctgcggcggcgtggtgatgatacatacacacagacaagcaagttaagcgctactccatatttaattaatagcagcgacggcgctttacactctgcacgcccagacccacgatgctgttcagagtactttgccagtttgctttcgggcgcggtctggctacggcgacgggctgtacggcggtgggctttctggtagcgacaggtttgggaacaggtgccgcagaagcagggggaggaggcaagtccaaggtggcgggtcgatgtgtctgagaaggtttcattaccccggtagccatgtgagctacaggcctggtagtgggcattccgagctttactgcctcctcgtatgaagggggctcgtctgcgcgcgtcaccagcgtctgctccagctcgggtcgcggacgcttgtcgccccgcttttccagcggaggaagttcttcctccacttccatttcaccaggggttgcgggcggcgggtccaggcggctgtttatctgtttttgtacagcctggttggccaaatccactacgccgttaataccagaggcgatcccatcgaccaccttctgttggaagttttgttccttaagcttatttctcagagcctgccctgtgctgctgttccaagctttgttcccataggtttttacggtcgagccaaaatttttaagcccgctccagatactgctccaattgaaggcgcccccgttcagttggctcgtgccgatgtcgctccaggtgcccatgtacggcctcgtgccgtgtcgcggagccagggatgaaaaattgatgtcttccatctctacaaaaacatagtcacaggaccaggagcgtcagagtccattctattttttatttataagttttttccaatgttagtggcgctgcgaggcctgaaccgccacggaagctatgcctggtatcgccccgatcgctgcggcgatgatgggtataagagctggcaaaaagccaccccctaatcgtctgctgatagcgcgccttcgtctgtggcggcgcatccctcgccccaacatccttctacggcgcgagtttcttcctcggtagccagtaatggggacgcgaaggcggcaagtgagggccatatctgcaaggaggcagcgtcaacagtcattaagtggtgatgcttggatggtagcgcgcgcgcggcagcgtcagaggttcagcgcgaccatcgcggtacactctccgcaccagggcggcgggagtcactttgctggcagtgttgcggcggcggcgactgcgagtgcgacttgcaggtggtttgcggcggcgagaggtgttgctccggtttcgatagtagcgagtgcctctgtaacccggagtgggaatgatggatgggtgcagagcatagttgggcattagaagacttgctgggccgtactttcgtcgtgatcttcgagtggtgctgggggcgacaacgggcgcgggcgtccagggttccgtttgcacctcaattgaggtggttgtgggttttgcaggttcggtctgcacttccatggactcggtgggaatcttgatgtcgaaggtttgtactcccaaacctggcgccacttccttgataggtcttactttgacctcaggctggatatcgggatccactttcattttctccagtacgtcttctagcctctggcgcttgggcaccattagctgcatggtaggatataggtcctcaccctcgcgctttacgcctctccgcgcaggcacgggcagcacttgctgcaaggtgactggtttgaggctgggggtgggatttccatgatccaagggaatggacacagcctcctctttgggactggatctagtgcgcttgccataagcaaactcatcaaggcggtctgccgcctgctcaagaatatcgtcatccccgtacacctcatcataggaccgtttaaaagtagtgctggaacgctcgccaggtgtaaaaaccacagtggttccgggtctgagcacttgacgcactttgcgcccgcgccactgcacgcgccgtcttggggcgaactcgcgcacaaactccaccagcccatcatcgtcatcttcttcctttttgttatttttgacccgcttgattttgcggggctttttttcatccttcaccggtggaccgtagatttcaggcgcgatgacctggagcatctcttccttgtatttgcgcttggacatacttgccgctgggacacaacatcggagactgctcagtatcttctaagtgcgaggggggcgggtgcgcacgggcacgcgctggccggtagtggcatcacgcacccagtacacattgcctcttcgcggttgggccatgttggcaatggccgctgctgccgccgtggccgcgcgcctgcgggacctgccgctgctggcacctaaagccgcgcgtctggccgctctaagcatggctcttcgccccacacgtttggccctccgcagaatagcttttgcagctcgcatggcggtagtagccctgtggcgcctggcaatgcgcctccttcggctcttccggcgagcataggcgcgggcgtctgccaccacactgtcaataactgcatccacagtagatgtaggcgcagtaggagtataattacgagcatcggcgaccacctggtcgatcacatcatcgaccgtggtccgagtgcgggtacgacccttgagtgcgccccatggagcgcggaaatgaccgcgaacgcgcacagggtgctgggtagagcgtatgcgggcgcctccatacatcttggtgggcgcatacagtccccaaccggtattattactgggcgagatgagaatggacattttttttttttttagaaagtgcggcttgaaagaacgcgcggcgcgactatgcccagggccttgtaaacgtagggacaggtgcggcgtctggcgtcagtaacggtcacgcgctggactccccggatactgctgcgtaacggcagggtcccgtgatctgtgagagcaggaacgttttcactgacggtggtaattgtgggcgccggcgggcggatgaggatctggttctcagggaagcggttgaagacgtgcgtgagcgaagtggcctgtcggagctgctgagagtacacggcttgctcattgtagaaactctttgagaagacgggcataagctctgcacccaccactgggtagttgttgacttgtcttgtggagcggaaggtgactgggtcttgcatcatgtcagggagcgaccagtagacctgctctgccccacaggtgacatctgaagtggtaagcagtgtccaagaccttattcctttctcggggttaccgtaattgtaggacaggtaccagctgcggtaggccgtgttgattttgtcttccaagacattgtagcttctactcttgctgtctttttctagaggttggatctttaactcttttttaacttcagcagctgcagcttcacgtttttgtttttcagttatataagtatctcctctagttatattatcatcttcactagttacctctgcaacagccagtgtggttgtttcagtagtggtatcctttttgctttcctcataggcagtgacatccaaaagggcaggaatattacccccttcaagatcttcatacatgattttgaaaccctcctggaatggatgtcttttcctgatgccaagcaagttgctaagtcggctttcagtaaagtctaccccgcaaccaggcagcaatacaatgtcaggatggaatgcctcataagtgtagactcctggcataatcaacttagtttcggggtcccacccgagcctaaagtttctagtgtcaaacttaacaccaatgtcactttccagcactccattttgtctgccaatttccaggtagttgtcaatgatggcattgttcatcaggtcaatggtcatggtggctgagaagttgccttctggtaaagtgaactcaaaccactcatactttaagatatcctctttatgatcataggtgtcatttactataacaccttcaggagcttttctggacaccatcaccctcgccttgaacttgttgctgaacatgtactcgttcacgttgggcatgttggtgtgcatgatggtcttcagctgaccgccccatcgcgaccgctcgtcaaagttgatggtctgggtgctagcctccgtgggggtaaagtcattgttctgcaccaccgtggtcaggaagttgctgtggtcgttctgatagttcagggaggcaatgtccgccgacttgttgtccaccagatacaacttggtggtatcgtacagaggcgacagctccgagtaacgaatgctgtttctcccttccgtaggcgccaggtaccgcgggggtacgaagggaacctccagtgggggctgtagcatcgccgcctgttgctgcatcacgctctcgtaagaaggaggaggaccctccggatacaccaccgctccgcctagcacggctcgtctcctcatcgtactaaacacagataacaaaaaagaacgaacgcacgctcggtcgccatggccttggtgagttgcatttttattttactttcacttttacaacatgcgcccgaatctgggacgcagatgagcgaacgggttgccccctcctcttccacccaagtccaacacgctgctatcatcggcagagtcctcatcgtcccacacaagacccatctgtctgtcgtggcgctggcgtctacgggtcggtctgcttgtagcccccaagattttgggctcgtctctgtgatcctgcgcataggtcttccatctactcatcttatccaccaggctctctattccattgttggggaagttcttttccctctctggcctcaacaaagagtcattcaagtactcatcctcgcccatcaagcgcgggcgggttattctccccagttcactgctgcgaacgctgtttagtgaaaagggcaagctagggaaaggacttgcagcttcgggcacggtcgcggcagcaccagccgttctggacagcgacacggaagagtgtcttctatcgcccccttccttcttccaaactgtataaccaaaaggcggggagaatatgctgctgtccacatcgtcccacaggaacccgtcattggggtcgggcatgtcgtactcgccagtgtagaaaccaggtgggggcagccagtgtgggttcaggatagcattggtgaaataatcagagttcatggcggccgccctgtgcaggtagtccagcagtttgttaatgaaaggcctgttactagcatacatgctgggctccatgtttcgagctgtcatgtccagcgcggcggtaggtgtcgccccctcctgcatcagaaacagtccaacgctctgttgcacgtatctgaggatccgctcctcctcagcggtaagcgcatactgaggagggatcttctgcgaccggttggttagcaagaagttcagggtggcttccaaactgcccgtgtcttcctgacccagggcgcggctcacttgggtgatttcttgataggtctgctcgtccacctggctctgccctatggcctcgcgatacaggttaagcaggtagcccaagtacgagttgcggtcgatgctaccgctgtcagtaaagggggataccagcagcagcagcaggcgggagttgggagtcagcaagctagacacggtcgcgcgatcccctactggggcgtgcactccccagagacccttcaggttcttgaaagcctgagtcaggttcactgtctgcaagccctgtctgctggtctggaagaagtaatctggcccggactggtacacctcgctctgaggcacctcagctaccatgagtctcaatgcactcaaaaagtttgtatagtcttgctgaccacggggcacgttagcgggctgggtgctgaggaaagcgtttagcgctaccaacgatcccaagttggcgtcgcgctggaaccgctcgcgctgagacacggcctcgcgcacatcggtcaccatccggtccaggttggtctgcacgttgctgctgttgtaacgggccacgcgctccaagagagcattgtataccagcccggcctcatcgggacggatggccttgttctccaccagcgcgttcacgatagccaggaccttctcgtgggtggggttggagcgggagggcactacggcctccagtatagccgaaaggcggttggcctggggttgctgtctaaaggcttcggggttgcgggtcgtcagcgccattatgcgttgcatggcctgggtccaatcgtccgaggagttaatgccggacggctggctctgcagcgccgcccgcattgcggggtccggtgcctgctgctgttccatctagcaaaaatacgggtcgcgccatcagtcttccaagtactcgccctcctcgtcctcgacttcatccacctcttctatgtaaggaagctcacaccctgcagcctccatggccctgcgactgggttgccattgcaagtccgctcccatgtcaaagtagttctccccatcggtcccagcccccgttagagctctttgcaagctgtgcataagttctctgtcgctcagctcgcgcctcctgctggcgctcaccgcacggtgcatcctgtcattgcgatacacccccagatcgtcgctcaaagtcagcaccttgagagtcatgcgcatgtaaaacccatctatctttacctccttgtctatgggtacgtagggggtcttgtagatcttgcgagcgtagtatttgcccaggctcaagaccgagtagttgatagctgccactttctcagccaaacccaggctacgttcctgcactataatactttgcaggatgttgatcagatcatacagccatctcccatcaggctcggtgatgttcaacaacgcctccctgaatgcctcgttgtccctgctatgttgaaccaccagaaacagctgagctgtcaggggtttgctagtggggttctgggtgatagcctccatcaggtcccacagatgcatcagacccagggtcacttcctcgcgggcgatcagggtgcgcacatggttgttaaaagatttttggaagttgcgctcctccttcacggtctgctcgtaggctgagactaggttggccgcggccacatgtgccctagctgggctgatccctgtcacttcatcgacctcaaaatcctcgtcttgcagcacccgtcttcgatccagaccgtggcgcagctcgcgacccgcgttaaatcgagatgctcgcatctcctctggctcctcaccgctcctgtccctgaacaggttctgctggggcacgtacgcctcgctagagtcctttttcagttgcacccgcgggtgccgctcgggcgatggtgcgcccaggcgcgccagtccctcgccctcttccaattccagatcataggcgggctgtcccgcgccgctgacggctgcagccgcagtagttacaggagcaggaagagccttttgtggctgtcgttgtagctgctgctgagaagggggctgttgctgggggcgcatctgtcgcagcacgggatgcatctgggcaacaaaaaacaaaaaaaaaaagagggctcgctcccgtaaactggagaagtcgcggaaaccggccgatccggcgcgctaagactcgaaccggggcacaccgcaacgcaaccctggcgattaattctccagactacgggcgcgagccactcccagccccgagaactgagtgttctaaagcttgacgcagcactggctcccatccaggaaaaagcaaaaaaacgacccgcctccgtatcctggaggttttgtgcaggcctgggtcgagacgggagtgccagtaccacgttagctgcggctccagcctgatccgagattcgaaccggggtacacgcgcagcccaacccgttcgcttagcctccaggccacggagacgagccgctgaccgctttcgtttttgcccgtatgtctagagcatcaacgactgtgcacgtctcacgggccaaaccgtgcctaccatgaactacttcatgccgctgcgcaacatctggaaccgcgtacgcgagttcccgcgggcatccaccaccgcctccggtatcacctggatgtccaggtacatctacggttaccaccgcctcatgctggaagaccttgcccccggagccccggctacagagcgatggcccctgtaccgccagccaccgccacactttctcatcggctaccagtacctggtgcgcacctgcaacgattacatctttgacacccgcgcatactcgcgcctcaagtacaccgagctcgtgcgccctgggcaccagacagtcaactggtcagtcatggccaactgctcctacacaatcaacaccggggcctaccaccgctttgtagactttgacgacttccaagccaccctcacccaggtgcagcaagccatcctcgccgaaagggttgtagcggacctggcacttgtccagcccatgcgcgggttcgggatcactcgcatgcatggcagagcgggcgaagaagaagtgcccgtggaacgactcatgcaagactactataaagatctggccagatgtcaggataatgcttggggaatggcccatcgcctgcgcatccaacaagccggacccaaagacctggtgctcctcgccaccatccgccgtctcaaaactgcctattttaatttcatcaccagcagcatcgtctcatcctcccaagaggaggaaggaaaagaaagagagaaccccgaccgagcgtctagccgcccccgcccgcaagaaacagtgctcagcctaccttgcgattgcgactggttagacgctttcgtcgaaaggttttcagatcccgtggatcttgagacgatcaggtccttgcgcggagtacctacggggcaattgataaaatgcataatcagcgcggtgtccctgcccaacggagagcctcccagtcaccacttcagggagatgcgcggaggcgtcttcactctgagacccagggagaacggtcgtgccgtcaccgagaccatgcgccgccgccgcggagaggtcattgaaagattcatcgaccgtctgcccgtgcgccgccggcgtcgccgcgttccccctcctcctgcagccccacctgaagaggaagagatgttagtggaagaagaagagattgaggaagaaatcccgggggatttcgagcgcgaggtgcgcaccaccattgccgaactcatccgtcttctggaagaggagttgaccgtgtccgcgcgtaactcccagtttttcaactttgccgtggacttctacgaggccatggagcgcttggaagcgctgggcgatgtcagcgagatgccgctgagacgatggatcatgtatttcttcgtcaccgagcacatcgccaccacactcaactaccttttccagcgcctatgcaactatgcggtcttcacccgccacgtagagcttaacctcgcccaggtggttatgcgcgcgagagatcccgtgggggctgtggtctacagccgcgtctggaacgaggcgggcatgaatgcattctctcaactcattgggcgcatctccaacgacctcgcggccaccgtcgagagagcgggccgcggagatcttcaagaggaagagatccagcagttcatggccgagatcgcctaccaggataactctggcgacgtgcaagaaatccttaggcaagccgccgtcaacgataccgagattgattctgttgaactctctttcaggttcaagctcacggggccggtagctttcacccagaggcgtcagatccaggatgtcaaccgccgcgtcgtcgcacatgcgagtcttctcagggcgcagtaccagaacctacccgcgcgcggcgccgacgtaccactgccagccatgccgccgggtcccgagccgcccctgccgcccggtgcgcgccctcgacaccgctcctaaacatgcaagaagcaacagagccaccgccgcccaaaaggaaaaacaagggcacggtggtagcgcccaaggggcacggaaccctgcaagccattgacatctccaccaacggacccgtggagatcaagtaccatctgaacctccctcacgccctcgaaaagatcatgcaagtcaatctcctgacactgcctactaacctgactccgcagcgtctcaggaccctggacagctccggcctgcacgctctcgtcctcgagctccgcccctgccgcgccgaggtctggacttgcctcccgcgagggctcgtcagcatgaccaccatcgagacagaagatggtcatgccgatgcagacaacatagtagagcgccaggtacaaacgccaggcctcaattttccactgaaatttctcgtcaaaggaagtcaggtacaactcattcatgaggtgcatcccgtgaatcgctgcgagtactgcggccgtctgtacaagcacaagcatgaatgctcggcgcgtcgcagggagttctacttccatcacatcaacagccattcctccaactggtggcaggagatccagttcttcccgattggctctcatcctcgcacagaaaggctcttcctcacctacgatgtggaaacctacacctggatggggtcctttggcaagcagctaatccccttcatgctggtcatgaaactctctggagaccagcggctcgtcaacatcgcctatgacctcgccatgaaacttaagtgggatcgctggcggcaggacccccaaaccttctattgcgtcaccccagaaaaaatggcagtcgggcagcattttcgtcaataccgggaccagttacaaacagcactcgcagtggacctctggtcctccttcctcaaagcgaaccctcacgtgcacgaatgggccctcgaacactatgctctcactgaccctacagatctcacttttgaagaactcaagaagctgccttatgtcaggggcacccctcgattcttagaactgtacatagtggggcacaacatcaatggctttgatgagatcgtcttggccgctcaggttatcaataaccgagcagaggtccctcagcctttcagaatcacccgaaatttcatgcccagggccggcaagatcctcttcaatgatgttactttcgctttgcccaaccccgcctacaagaagcgggtggacttccaactctgggaacagggggcctgtgatgacatggacttcaagtatcaattcctcaaagtcatggtcagggacacttttgccctcactcatacctcgctgcgcaatgcagcccaagcatactctctcccagtggagaagggatgctgtccctacaaggcagtcaatcagttctacatgttgggctcttaccgtgcagaaaaagacgggtttcccctcgaagagtactggaaggatcgcgaagaataccttctcaaccgcgagctgtgggaaaagaaaagccaaccgcgttatgacatcatccaggaaactctcgactactgtgccctggatgtactcgtcaccgccgagctggtagccaagctgcaagagtcatatgcccacttcataagggactctgtaggcctacctcatgcccattttaacatattccagagacctactatctcttcaaattcccatgccatctttcgccagatcgtttacagggcggaaaaacccaaccgcaccaatctgggcccgggtcttctcgccccctcacatgaactctatgactatgtgcgagcaagcatcagaggggggcgctgttatcccacttacatcggcatcctcgaagagcccctctatgtatacgatatctgtggcatgtatgcctccgcgctcacccaccccatgccctggggcacccctcttaacccctatgagcgcgcgctggcagttcgagaatggcagatgaccttggatgatcccaccaccattagctattttgacaaagatttgttaccgggaatatttaccatagatgcggacccccctgatgagctcatgctagaccccctcccccctttctgttcaagaaaaggaggtcgactctgctggaccaatgagcccctccgaggcgaggtggccaccagtgtggatctgataaccctgcacaataggggatggcgagtcagaatagttccggatgaactgacaaccatcttccctgaatggaaatgtgtggcgcgcgagtacgtccagcttaacatcgccgccaaggagcgcgcggacaaggaaaagaaccaaaccatgcgctccatcgccaagcttctatccaatgccctctatggatcatttgctaccaagctggacaacaagaagattgtgttttctgaccaaatggacgagagtcttatgaaaggcatctctgctggtactgtcaatatcaaatcctcctcgttcctagaaactgacaacctgagtgcagaggtcatgcccgccttcgagagggaatacctaccccaacagctggcgctcctggacagcgatccggaagacagtgaggacgaacagaggcccgcccccttttatacccccccggcggggacccctggtcacgtggcctacacttacaagccaatcacattcttggatgtggaggagggggacatgtgtttacataccgtagagaaggtggaccccctggttgacaacgaccgctacccctcccacgtggcctcctttgtgctggcctggacacgcgcttttgtatcagagtgggctgggttcctctacgaagaggaccgaggcactccgctcgaggacaggcccataaagtcggtctacggggacacggacagcctctttgtcacccagcggggacacgacctcatggaaaccaaaggtaagaaacgcatcaaaaaacatggcggaaaacttgtttttgaccccgatgagccggatctgacctggctcgtggagtgcgaaaccgtctgcgcctcctgcggtgcgaatgcatactcccccgaatccattttcctcgcgcccaagctgtatgccctcaaatgtatctactgccccgcctgccataaaacttccaaaggtaagctccgtgccaaaggccacgcggccgaggcgctcaactacgaactcatggtaaactgctacctggccgacatgcagggcgccgatcggcagcggttctcgaccagcaggatgagtctgaagcgcaccctcgcaagcgcccaaccaggcgcgcacccattcaccgtgacggaaacaaccctaactcggacgctgcgaccatggaaggatcggaccctggcagcgctggacgcccatcgtctgattccctactccaggagccgtcccaacccgcgaaacgaggaggtctgctggatcgagatgccatagagcacatcaccgagctctgggaccggctcgagctcttgcaacagactctttccaaaatgcccatggctgacgggctgaagccgctgaaaaacttctcctcgctccaggagcttctatcccttgggggagagcgcctcctaacggacttggtgcgggaaaatatctatgtaagggaaatgatgaacgaagtggcccccctactccgggaggacggcagctgtcgctccctaaactaccatctgcaacccgtaattggggtcatttacggtcccactgggtgcggcaagtctcagctgcttaggaatttgctctcatcccagttaatcaccccggctccagaaacggtattttttatagccccgcaggtggacatgatccccccctctgaactgaaagcctgggaaatgcaaatatgtgaggggaactatgctcccgggccagagggaactttcatcccccaatctggcaccctccgcccaaagtttattaaaatggcttatgatgacctgactcaggagcataactatgatgtttcagacccccggaacgtgttcgcccgtgccgctgcccacggccccatcgctatcattatggatgagtgcatggagaatctggggggtcacaaaggcgtctccaaattttttcatgcttttccctctaagctgcatgataaatttcccaagtgcaccggatacactgtcttagtggtcctgcacaatatgaacccgagacgggatctaggcggcaacattgccaacctcaagatccagtccaaaatgcatataatttcaccccggatgcacccgtcccagctcaatagatttgtaaacacctacactaagggcctccccgttgcaattagtctgctcctaaaagatattgtgcaacaccatgcactccgaccttgctatgactgggtgatttataacactaccccggagcaagaggctcttcaatggagctatctccacccccgagacggactaatgcctatgtatctaaacattcaatcccacctttacagggtactggaaaagatccaccgagttctcaatgatcgagaccgatggtccagggcataccgcgcgcgaaaaatcaaataaaca

SEQ ID NO: 124 - DNA, 4036 bp, Human adenovirus
  misc_feature 1..4036: note = Human adenovirus 7, Ad7 E3
  source 1..4036: mol_type = genomic DNA
tataaaacgcctggtgatcagaggccgaggtatccagctcaacgacgagtcggttagctcttcgcttggtctgcgaccagacggagtcttccagatcgccggctgtgggagatcttccttcacccctcgtcaggctgtactgactttggagagttcgtcctcgcagccacgctcgggcggcatcggaactctccagttcgtggaggagtttactccctctgtctacttcaaccccttctccggctctcctggccagtacccagacgagttcataccgaacttcgacgcaatcagcgagtcagtggatggctatgattgatgtctaatggtggcgcggctgagctagctcgactgcgacacctagaccactgccgccgctttcgctgcttcgcccgggaactcaccgagttcatctacttcgaactccccgaggagcaccctcagggtccggcccacggagtgcggattaccatcgaagggggaatagactctcgcctgcatcgaatcttctcccagcgacccgtgctgattgagcgcgaccagggaaatacaaccatctccatttactgcatctgtaaccaccccggattgcatgaaagcctttgctgtcttgtttgtgctgagtttaataaaaactgagttaagaccctcctacggactaccgcttcttcaatcaggactttacaacaccaaccagatcttccagaagacccagacccttcctcctctgatccaggactctaactctaccttaccagcaccatccactactaaccttcccgaaactaacaagcttggatctcatctgcaacaccgcctttcacgaagccttctttctgccaatactaccactcccaaaaccggaggtgagctccgcggtctccctactgacgacccctgggtggtagcgggttttgtaacgttaggagtagttgcgggtgggcttgtgctaatcctttgctacctatacataccttgctgtgcatatttagtcatattgcgctgttggtttaaaaaatgggggccatattagtcgtgcttgctttactttcgcttttgggtctgggctctgctaatctcaatcctcttgatcacgatccatgtctagacttcgacccagaaaactgcacacttacttttgcacccgacacaagccgtctctgtggagttcttattaagtgcggatgggactgcaggtccgttgaaattacacataataataaaacatggaacaataccttatccaccacatgggagccaggagttcccgagtggtatactgtctctgtccgaggtcctgacggttccatccgcattagtaacaacacttttattttttctgaaatgtgcgatctggccatgttcatgagcagacagtatgacctatggcctcccagcaaagagaacattgtggcattttccattgcttattgcttggtaacatgcatcatcactgctatcatttgtgtgtgcatacacttgcttatagttattcgccctagacaaagcaataaggaaaaagagaaaatgccttaacctttttactcataccttttctttacagcatggcttttgttacagctctaattattgccaacattgtcactgtcgctcacgggcaaacaattatccatattaccttaggacataatcacacccttgtagggcccccaattacttcagaggttatttggaccaaacttggaagtgttgattattttgatataatttgcaacaaaactaaaccaatatttgtaatctgtaacagacaaaatctcacgttaattaatgttagcaaaatttataacggttactattatggttatgacagatccagtagtcaatataaaaattacttagttcgcataactcagcccaaattaacagtgcccactatgacaataattaaaatggctaataaagcattagaaaattttacatcaccaacaacgcccaatgaaaaaaacattccaaattcaatgattgcaattattgcggcggtggcattgggaatggcactaataataatatgcatgttcctatatgcttgttgctataaaaagtttcaacataaacagatccactactaaattttaacatttaattttttatacagatgttttccactacaatttttatcattactagccttgcagctgtaacttatggccgttcacacctaactgtacctgttggctcaacatgtacactacaaggaccccaacaaggctatgtcacttggtggagaatatatgataatggagggttcgctgaccatgtgatcagcctggtacaaaattttcatgcaacggaagagacttgaccataattaacataacatcaaatgacaaggcttctattatggaaccaactataaagatagtttagattacaacattattgtagtgccagccaccacttctgtccccgcaaaaccactttctctagcagcagtgccaaagcaagcacaattcctaaaacagcttctgctatgttaaagcttcaaaaaatcgctttaaataattccacagccgctcccaatacaattcctaaatcaacaattggcatcattactgccgtggtagtgggattaattattatatttttgtgcataatgtactatgcctgctgctatagaaaacatgaacaaaaaggtgatgcattactaaattttgacatttaattttttatagaattatgatattgtttcaatcaaataccactaacactatcaatgtgcagactactttaaatcatgacatggaaaaccacactacctcctatgcatacacaaacattcagcctaaatacgctatgcaatagaaattctaaaagacgtcccatctattctcctatgattagtcgtccccatatggctttgaatgaaatctaagatctttttttttttctcttacagtatggtgaacaccaatcatgatccctagaaatttcttcttcaccatactcatctgtgctttcaatgtctgtgctactttcacagcagtagccactgcaagcccagactgtataggaccatttgcttcctatgcactttttgccttcgttacttgcatctgcgtgtgtagcatagtctgcctggttattaattttttccaactggtagactggatctttgtacgaattgcctacctacgtcaccatcccgaataccgcaatcaaaatgttgcggcacttcttaggcttatttaaaaccatgcaggctatgctaccagtcattttaattctgctactaccctgcattgccctagcttccaccgccactcgcgctacacctgaacaacttagaaaatgcaaatttcaacaaccatggtcatttcttgattgctaccatgaaaaatctgatttccccacatactggatagtgattgttggaataattaacatactttcatgtacctttttctcaatcacaatataccccacatttaattttgggtggaattctcccaatgcactgggttacccacaagaaccagatgaacatatcccactacaacacatacaacaaccactagcactggtagagtatgaaaatgagccacaaccttcactacctcctgccattagttacttcaacctaaccggcggagatgactgaaatactcaccacctccaattccgccgaggatctgcttgatatggacggccgcgtctcagaacagcgactcgcccaactacgcatccgccagcagcaggaacgcgtgaccaaagagctcagagatgtcatccaaattcaccaatgcaaaaaaggcatattttgcttggtaaaacaagccaagatatcctacgagatcaccgctactgaccatcgcctctcttacgaacttggcccccaacgacaaaaatttacatgcatggtgggaatcacccctatagttatcactcagcaaagtggagatactaaggggtgcattcactgctcttgcgattccatcgagtgcacctacaccctgctaaagaccctatgcggcctaagagacctgctacccatgaattaaaaattaataaaaaatca

SEQ ID NO: 125 - DNA, 978 bp, Human adenovirus
  misc_feature 1..978: note = Human adenovirus 7, Ad7 fiber
  source 1..978: mol_type = genomic DNA
accaagagagtccggctcagtgattccttcaaccctgtctacccctatgaagatgaaagcacctcccaacacccctttataaacccagggtttatttccccaaatggctttacacaaagcccagacggagttcttactttaaaatgtttaaccccactaacaaccacaggcgggtctctacagttaaaagtgggagggggtcttacaatagatgacaccgacggttttttgaaagaaaacataagtgccaccacaccactcgttaagactggtcactctataggtttgtcgctaggacccggattaggaacaaatgaaaacaaactttgtgccaaattgggagaaggacttacattcaattccaacaacatttgcattaatgacaatattaacaccctatggacaggagttaaccccaccagagccaactgtcaaataatggcctccagtgaatctaatgattgcaaattaattctaacactagttaaaactggagccctcgtcactgcatttgtttatgttataggagtatctaacgattttaatatgctaactacacataaaaatataaatttcactgcagagctgttttttgattctactggtaatttattaactagcctttcatccctaaaaactccacttaatcataaatcagggcaaaacatggctactggtgcccttactaatgctaaaggtttcatgcccagcacaactgcctatcctttcaatgttaattccagagaaaaagaaaactacatttacggaacttgttactacacagctagtgatcacactgcttttcccattgacacatctgtcatgcttaaccaaagagcattaaataatgagacatcatattgtattcgtgtaacttggtcctggaatacaggagttgccccagaagtgcaaacctctgctactaccctagtcacctctccatttaccttttactacattagagaagacgactgacaa

SEQ ID NO: 126 - DNA, 126 bp, Human adenovirus
  misc_feature 1..126: note = Human adenovirus 7, Ad7 fiber tail
  source 1..126: mol_type = genomic DNA
accaagagagtccggctcagtgattccttcaaccctgtctacccctatgaagatgaaagcacctcccaacacccctttataaacccagggtttatttccccaaatggctttacacaaagcccagac

SEQ ID NO: 127 - DNA, 273 bp, Human adenovirus
  misc_feature 1..273: note = Human adenovirus 7, Ad7 fiber shaft
  source 1..273: mol_type = genomic DNA
ggagttcttactttaaaatgtttaaccccactaacaaccacaggcgggtctctacagttaaaagtgggagggggtcttacaatagatgacaccgacggttttttgaaagaaaacataagtgccaccacaccactcgttaagactggtcactctataggtttgtcgctaggacccggattaggaacaaatgaaaacaaactttgtgccaaattgggagaaggacttacattcaattccaacaacatttgcattaatgacaatattaacacccta

SEQ ID NO: 128 - DNA, 576 bp, Human adenovirus
  misc_feature 1..576: note = Human adenovirus 7, Ad7 fiber knob
  source 1..576: mol_type = genomic DNA
tggacaggagttaaccccaccagagccaactgtcaaataatggcctccagtgaatctaatgattgcaaattaattctaacactagttaaaactggagccctcgtcactgcatttgtttatgttataggagtatctaacgattttaatatgctaactacacataaaaatataaatttcactgcagagctgttttttgattctactggtaatttattaactagcctttcatccctaaaaactccacttaatcataaatcagggcaaaacatggctactggtgcccttactaatgctaaaggtttcatgcccagcacaactgcctatcctttcaatgttaattccagagaaaaagaaaactacatttacggaacttgttactacacagctagtgatcacactgcttttcccattgacacatctgtcatgcttaaccaaagagcattaaataatgagacatcatattgtattcgtgtaacttggtcctggaatacaggagttgccccagaagtgcaaacctctgctactaccctagtcacctctccatttaccttttactacattagagaagacgactga

SEQ ID NO: 129 - DNA, 1635 bp, Human adenovirus
  misc_feature 1..1635: note = Human adenovirus 7, Ad7 penton
  source 1..1635: mol_type = genomic DNA
atgaggagacgagccgtgctaggcggagcggtggtgtatccggagggtcctcctccttcttacgagagcgtgatgcagcaacaggcggcgatgctacagcccccactggaggttcccttcgtacccccgcggtacctggcgcctacggaagggagaaacagcattcgttactcggagctgtcgcctctgtacgataccaccaagttgtatctggtggacaacaagtcggcggacattgcctccctgaactatcagaacgaccacagcaacttcctgaccacggtggtgcagaacaatgactttacccccacggaggctagcacccagaccatcaactttgacgagcggtcgcgatggggcggtcagctgaagaccatcatgcacaccaacatgcccaacgtgaacgagtacatgttcagcaacaagttcaaggcgagggtgatggtgtccagaaaagctcctgaaggtgttatagtaaatgacacctatgatcataaagaggatatcttaaagtatgagtggtttgagttcactttaccagaaggcaacttctcagccaccatgaccattgacctgatgaacaatgccatcattgacaactacctggaaattggcagacaaaatggagtgctggaaagtgacattggtgttaagtttgacactagaaactttaggctcgggtgggaccccgaaactaagttgattatgccaggagtctacacttatgaggcattccatcctgacattgtattgctgcctggttgcggggtagactttactgaaagccgacttagcaacttgcttggcatcaggaaaagacatccattccaggagggtttcaaaatcatgtatgaagatcttgaagggggtaatattcctgcccttttggatgtcactgcctatgaggaaagcaaaaaggataccactactgaaacaaccacactggctgttgcagaggtaactagtgaagatgataatataactagaggagatacttatataactgaaaaacaaaaacgtgaagctgcagctgctgaagttaaaaaagagttaaagatccaacctctagaaaaagacagcaagagtagaagctacaatgtcttggaagacaaaatcaacacggcctaccgcagctggtacctgtcctacaattacggtaaccccgagaaaggaataaggtcttggacactgcttaccacttcagatgtcacctgtggggcagagcaggtctactggtcgctccctgacatgatgcaagacccagtcaccttccgctccacaagacaagtcaacaactacccagtggtgggtgcagagcttatgcccgtcttctcaaagagtttctacaatgagcaagccgtgtactctcagcagctccgacaggccacttcgctcacgcacgtcttcaaccgcttccctgagaaccagatcctcatccgcccgccggcgcccacaattaccaccgtcagtgaaaacgttcctgctctcacagatcacgggaccctgccgttacgcagcagtatccggggagtccagcgcgtgaccgttactgacgccagacgccgcacctgtccctacgtttacaaggccctgggcatagtcgcgccgcgcgttctttcaagccgcactttctaa

SEQ ID NO: 130 - DNA, 2805 bp, Human adenovirus
  misc_feature 1..2805: note = Human adenovirus 7, Ad7 hexon
  source 1..2805: mol_type = genomic DNA
atggccaccccatcgatgatgccccaatgggcatacatgcacatcgccggacaggatgcttcggagtacctgagtccgggtctggtgcagttcgcccgtgcaacagacacctacttcagtatggggaacaagtttagaaaccccacagtggcgcccacccacgatgtgaccaccgaccgtagccagcgactgatgctgcgcttcgtgcccgttgaccgggaggacaatacatactcttacaaagtgcggtacaccctcgccgtgggcgacaacagagtgcttgacatggccagcacattctttgacattaggggggtgcttgatagaggtcctagcttcaagccatattccggcacagcttacaattcactggctcctaagggcgcgcctaacacatctcagtggatagttacaacgggagaagacaatgccaccacatacacatttggcattgcttccacgaagggagacaatattactaaggaaggtttagaaattgggaaagacattactgcagacaacaagcccatttatgccgataaaacatatcagccagagcctcaagttggagaagaatcatggactgatattgatggaacaaatgaaaaatttggaggtagagctcttaaaccagctactaaaatgaagccatgctacgggtcttttgcaagacctacaaacataaaagggggccaagctaaaaacagaaaagtaacaccaaccgaaggagatgttgaagctgaggagccagatattgatatggaatttttcgatggtagagaagctgctgacgctttttcgcctgaaattgtgctttacacggaaaatgtcaatttggaaactccagacagccatgtggtatacaagccaggaacttctgatggtaactctcatgcaaatttgggtcaacaagccatgcctaacagacccaattacattggcttcagggataactttgtaggtcttatgtactacaacagtactggaaatatgggagttttggccggccaagcatcacaactgaatgcagtggttgacttgcaggacagaaacactgaactgtcatatcagcttttgcttgattctctgggagacagaagcagatacttcagcatgtggaatcaggctgtggacagctatgatcccgatgttcgtattattgaaaatcatggcgtcgaggatgaactgcctaattactgttttcctctggatggcataggaccagggaacaaatatcaaggcattaaacctagagacactgcatgggaaaaagatactaaagtttatacagctaatgaaatagccataggcaacaatctggctatggaaattaatatccaagctaatctttggagaagttttctgtactccaatgtggctttgtaccttccagatgtttacaagtacacgccaactaacattactctgcccgctaacaccaacacctatgagtacatgaacgggcgagtggtttccccatctctggtcgattcatacatcaacattggcgccaggtggtctcttgacccaatggacaatgtgaatccatttaaccaccaccgcaatgctggcctacgctaccggtccatgcttctgggcaatggccgttatgtgcctttccacatacaagtgcctcaaaaattctttgctgtcaagaacctacttcttctacctggctcctacacctatgagtggaacttcagaaaggatgtgaacatggtcctgcaaagttcccttggaaatgacctcagaacagatggtgctaccataagtttcaccagcatcaacctctatgccaccttcttccccatggctcacaacaccgcttcaactcttgaagccatgctgcgcaacgataccaatgatcagtcattcaacgactacctctctgcagctaacatgctttaccccatccctgccaatgcaaccaacattccaatttccatcccatctcgcaactgggcagccttcaggggctggtccttcaccagactcaaaaccaaggagactccatctcttggatcagggttcgatccctacttcgtttattctggatctattccctacctggatggcactttttaccttaaccacactttcaagaaggtctccatcatgtttgactcctcagtcagctggcctggcaatgacaggctgttgtctccaaatgagtttgaaatcaagcgcactgtggatggggaaggatacaatgtggcccaatgcaacatgaccaaagactggttcctggttcagatgcttgccaactacaacattggctaccagggcttttacatccctgagggatacaaggatcgcatgtactcctttttcagaaacttccagcctatgagcaggcaggtggttgatgaggttaattacactgactacaaagccgtcaccttaccatatcaacacaacaactctggctttgtaggataccttgcgcctactatgagacaaggggaaccttacccagccaattatccatacccgctcatcggaactactgccgttaaaagtgttacccaaaaaaagttcctgtgcgacaggaccatgtggcgcataccgttctccagcaacttcatgtccatgggagcccttacggacctgggacagaacctgctctatgccaactcggcccatgcgctggacatgacttttgaggtggatcccatggatgagcccaccctgctttatcttcttttcgaagtcttcgacgtggtcagagtgcaccagccacaccgcggcgtcatcgaggccgtctacctgcgcacaccgttctcggccggcaacgccaccacataa

SEQ ID NO: 131 - protein, 325 aa, Human adenovirus; identical to SEQ ID NO: 64
  REGION 1..325: note = misc_feature - Human adenovirus 7, Ad7 fiber

SEQ ID NO: 132 - protein, 91 aa, Human adenovirus
  REGION 1..91: note = misc_feature - Human adenovirus 7, Ad7 fiber shaft
DGVLTLKCLTPLTTTGGSLQLKVGGGLTIDDTDGFLKENISATTPLVKTGHSIGLSLGPGLGTNENKLCAKLGEGLTFNSNNICINDNINT

SEQ ID NO: 133 - protein, 192 aa, Human adenovirus
  REGION 1..192: note = misc_feature - Human adenovirus 7, Ad7 fiber knob
LWTGVNPTRANCQIMASSESNDCKLILTLVKTGALVTAFVYVIGVSNDFNMLTTHKNINFTAELFFDSTGNLLTSLSSLKTPLNHKSGQNMATGALTNAKGFMPSTTAYPFNVNSREKENYIYGTCYYTASDHTAFPIDISVMLNQRALNNETSYCIRVTWSWNTGVAPEVQTSATTLVTSPFTFYYIREDD

SEQ ID NO: 134 - protein, 544 aa, Human adenovirus; identical to SEQ ID NO: 65
  REGION 1..544: note = misc_feature - Human adenovirus 7, Ad7 penton

SEQ ID NO: 135 - protein, 934 aa, Human adenovirus; identical to SEQ ID NO: 66
  REGION 1..934: note = misc_feature - Human adenovirus 7, Ad7 hexon

SEQ ID NO: 136 - protein, 42 aa, Human adenovirus
  REGION 1..42: note = misc_feature - Human adenovirus 7, Ad7 fiber tail
MTKRVRLSDSFNPVYPYEDESTSQHPFINPGFISPNGFTQSP

SEQ ID NO: 137 - DNA, 137 bp, Human adenovirus
  misc_feature 1..137: note = Human adenovirus 11, Ad11 5? (left) ITR
  source 1..137: mol_type = genomic DNA
catcatcaataatataccttatagatggaatggtgccaatatgtaaatgaggtgattttaaaaagtgtggatcgtgtggtgattggctgtggggttaacggctaaaaggggcggtgcgaccgtgggaaaatgacgtt

SEQ ID NO: 138 - DNA, 137 bp, Human adenovirus
  misc_feature 1..137: note = Human adenovirus 11, Ad11 3? (right) ITR
  source 1..137: mol_type = genomic DNA
aacgtcattttcccacggtcgcaccgccccttttagccgttaaccccacagccaatcaccacacgatccacactttttaaaatcacctcatttacatattggcaccattccatctataaggtatattattgatgatg

SEQ ID NO: 139 - DNA, 342 bp, Human adenovirus
  misc_feature 1..342: note = Human adenovirus 11, Ad11 Packaging Sequence
  source 1..342: mol_type = genomic DNA
ttgtgggggtggagtttttttgcaagttgtcgcgggaaatgtgacgcataaaaaggcttttttctcacggaactacttagttttcccacggtatttaacaggaaatgaggtagttttgaccggatgcaagtgaaaattgttgattttcgcgcgaaaactgaatgaggaagtgtttttctgaataatgtggtatttatggcagggtggagtatttgttcagggccaggtagactttgacccattacgtggaggtttcgattaccgtgttttttacctgaatttccgcgtaccgtgtcaaagtcttctgtttttacgtaggtgtcagctgatcgctagggtatt

SEQ ID NO: 140 - DNA, 3452 bp, Human adenovirus
  misc_feature 1..3452: note = Human adenovirus 11, Ad11 E1
  source 1..3452: mol_type = genomic DNA
tatacctcagggtttgtgtcaagaggccactcttgagtgccagcgagaagagttttctcctctgcgccggcagtttaataataaaaaaatgagagatttgcgatttctgcctcaggaaataatctctgctgagactggaaatgaaatattggagcttgtggtgcacgccctgatgggagacgatccggagccacctgtgcagctttttgagcctcctacgcttcaggaactgtatgatttagaggtagagggatcggaggattctaatgaggaagctgtaaatggcttttttaccgattctatgcttttagctgctaatgaagggttagaattagatccgcctttggacacttttgatactccaggggtaattgtggaaagcggtacaggtgtaagaaaattacctgatttgagttccgtggactgtgatttgcactgctatgaagacgggtttcctccgagtgatgaggaggaccatgaaaaggagcagtccatgcagactgcagcgggtgagggagtgaaggctgccaatgttggttttcagttggattgcccggagcttcctggacatggctgtaagtcttgtgaatttcacaggaaaaatactggagtaaaggaactgttatgttcgctttgttatatgagaacgcactgccactttatttacagtaagtgtgtttaagttaaaatttaaaggaatatgctgtttttcacatgtatattgagtgtgagttttgtgcttcttattataggtcctgtgtctgatgctgatgaatcaccatctcctgattctactacctcacctcctgagattcaagcacctgttcctgtggacgtgcgcaagcccattcctgtgaagcttaagcctgggaaacgtccagcagtggaaaaacttgaggacttgttacagggtggggacggacctttggacttgagtacacggaaacgtccaagacaataagtgttccatatccgtgtttacttaaggtgacgtcaatatttgtgtgacagtgcaatgtaataaaaatatgttaactgttcactggtttttattgctttttgggcggggactcaggtatataagtagaagcagacctgtgtggttagctcataggagctggctttcatccatggaggtttgggccattttggaagaccttaggaagactaggcaactgttagagaacgcttcggacggagtctccggtttttggagattctggttcgctagtgaattagctagggtagtttttaggataaaacaggactataaccaagaatttgaaaagttgttggtagattgcccaggactttttgaagctcttaatttgggccatcaggttcactttaaagaaaaagttttatcagttttagacttttcaaccccaggtagaactgctgctgctgtggcttttcttacttttatattagataaatggatcccgcagactcatttcagcaggggatacgttttggatttcatagccacagcattgtggagaacatggaaggttcgcaagatgaggacaatcttaggttactggccagtgcagcctttgggtgtagcgggaatcctgaggcatccaccggtcatgccagcggttctggaggaggaacagcaagaggacaacccgagagccggcctggaccctccagtggaggaggcggagtagctgacttgtctcctgaactgcaacgggtgcttactggatctacgtccactggacgggataggggcgttaagagggagagggcatctagtggtactgatgctagatctgagttggctttaagtttaatgagtcgcagacgtcctgaaaccatttggtggcatgaggttcagaaagagggaagggatgaagtttctgtattgcaggagaaatattcactggaacaggtgaaaacatgttggttggagcctgaggatgattgggaggtggccattaaaaattatgccaagatagctttgaggcctgataaacagtataagattactagacggattaatatccggaatgcttgttacatatctggaaatggggctgaggtggtaatagatactcaagacaaggcagttattagatgctgcatgatggatatgtggcctggggtagtcggtatggaagcagtaacttttgtaaatgttaagtttaggggagatggttataatggaatagtgtttatggccaataccaaacttatattgcatggttgtagcttttttggtttcaacaatacctgtgtagatgcctggggacaggttagtgtacggggatgtagtttctatgcgtgttggattgccacagctggcagaaccaagagtcaattgtctctgaagaaatgcatatttcaaagatgtaacctgggcattctgaatgaaggcgaagcaagggtccgccactgcgcttctacagatactggatgttttattttgattaagggaaatgccagcgtaaagcataacatgatttgcggtgcttccgatgagaggccttatcaaatgctcacttgtgctggtgggcattgtaatatgctggctactgtgcatattgtttcccatcaacgcaaaaaatggcctgtttttgatcacaatgtgatgacgaagtgtaccatgcatgcaggtgggcgtagaggaatgtttatgccttaccagtgtaacatgaatcatgtgaaagtgttgttggaaccagatgccttttccagaatgagcctaacaggaatttttgacatgaacatgcaaatctggaagatcctgaggtatgatgatacgagatcgagggtacgcgcatgcgaatgcggaggcaagcatgccaggttccagccggtgtgtgtagatgtgactgaagatctcagaccggatcatttggttattgcccgcactggagcagagttcggatccagtggagaagaaactgactaaggtgagtattgggaaaactttggggtgggattttcagatggacagattgagtaaaaatttgttttttctgtcttgcagctgtcatgagtggaaacgcttcttttaaggggggagtcttcagcccttatctgacagggcgtctcccatcctgggcaggagttcgtcagaatgttatgggatctactgtggatggaagacccgtccaacccgccaattcttcaacgctgacctatgctactttaagttcttcacctttggacgcagctgcagctgccgccgccgcttctgttgccgctaacactgtgcttggaatgggttactatggaagcatcatggctaattccacttcctctaataacccttctaccctgactcaggacaagttacttgtccttttggcccagctggaggctttgacccaacgtctgggtgaactttctcagcaggtggtcgagttgcgagtacaaactgagtctgctgtcggcacggcaaagtctaaataaaaaaatcccagaatcaatgaataaataaa

SEQ ID NO: 141 - DNA, 21483 bp, Human adenovirus
  misc_feature 1..21483: note = Human adenovirus 11, Ad11 E2
  source 1..21483: mol_type = genomic DNA
ttggaggctgtgattggtcctcatagaacttgatttcataggggtggtaatcttccggagcaaacttgcgcaagtaggcggaggtccacagtcccggggtcagttttaaactttgcccaggagaagacccatcgccttggctgctggggccttgcaattcaaaggtgcctattatctgggtttcgctcatcaactgggggttgcaagctagggaccggtggggcgtgcacagattgcagcggcagtgacactccagcaagccgtctccgctcacatcctcgatcacatccgagtggtaggagagatagttggccagacggaacaggtagcagtgactccatagcggcggggggcactcgcggtaggtgagaggcacaaagtcggagggcagtgcgcagcaggtggcgggcaggataccggagcgttccaggatgaaagagcgaaaattgttaagcatgctctggctcataaagtcaggcaatccgtttcgcaaagtaaccctgagacgctctgggaagatgaggtctgccaggtcggaagcgacggtgcgctcgtcgaaccctgtccacagaaccttaagagatttctgtaagagcttgtcaagctctttcaagttctgttcttctaaacattgctgccatacacccatgccggtttgccacgtgtggcacaggtacagatagacacaatcgcggatgtaatcacggcgggcttcccccttcagggtgctgtgcagcacgctttgtcctaggcgattctcatgcagaatacccatgtaggaaaccaggttggtgagttccacgttagatatcttgcatgcctgccgcacaaagccgtgtctaaaagtgtagtgcagattctcttcgagtttgcgcaaggtttctgaatcggtaaagaaacgtcggagacactctagttctacggtaaccagcaccacggccatcataagcttgcgacgctcttccaaatccctgggagagtcggtgcccagccatcgggttagctgctcatcactgaccactggtttaccctcatcacaggcatctgggtcatgcatgtcttctgaaaggggacttgcgcgcttaatgagtaactggtccatgaccgccgtcatgactttagggggcaggttgacagcgggatatgcgaagtgtgtgacctcgatgcttcgcttgagtactgcgagtctggcattatcgccttccaattccaccagaacgctgtgatgctcatccatgccattttctcccttttgcagagcatttgcggcccgagtctcattattgcccagaccctcgaagatctttggaacctcttccaaggaagctatatcaggtaagcgtgaaccaggtcccagattgagtagggcatcggcgcgggtgcgattagcgcggcaggagactggaattttttgatttttaaaaaagatgtgataggtagccagtacttctggcacagcaaaagctggataaaagtttaagcgaggatttggctcgcaggtgccgtttggctgacgtttggggggagtacgaggtgaaaagaggttaagctcgtaggcgcggctgagctcttccacactgatgggcacttcagttctgtccaataatgcatccttgactatgagcgactgtcttgctagatgtttaaggagcgcgtcttccccgtcaagccctatgaggtagtcggtgttctgatccctatttccagcatcttggtgatagttatctgctcgttgttttgggcagttttcatcctctctctctagaaagcgtttcaactcttcctcgtgttccaccggtgtcacatagcccgggtcttgctcgatgtctgtctcagactctttcgcttttttattctgcatgtcatgagatgcgtcgacctccttatcttctagggtagaggtggtggcaggactgggcggtggaatgcttaagctctgctccttttcctcgtcgctgaggacgagatgtgatggcactcgtggcgatgttgacagcaatggctgagtttccatgtctgttgtttctctgcctaggagaacacaatggccagccgcgaaggaaatcagttaagcgaccgccacagggagcacacccccgaacgcggaaggggttctgccagtcatccgccttccaggtcggaccgcagcccttcgcaatcgcctccacctctgcccccgaagagaaacacctgtcgccgtgtggggtcaggttcttctaccgacagtcagttggtaatggtgagcgaaacgtcacaatcctccctgtctccggaacggagcgacagtcctcctcctccgataccccccaaaaagaagccaaggaagaccaaacatatccccatgcaagacatcagtcaagacagcgaagaagaaagagaagaggcgcaacttgtagcagtgggtttcagctacccgcccgtgcgcatcgttgagaaggatggcaaaagaagcattgagaagatcgctaaagatgaccctctggctaaaggagctgctgcctgcactgttaagaatccgattagcttgcccctggtgtctgcttgggagaaaggcatggaagtgatgtgtctgctgatggagaagtacaggctggataacgaacttagaacctcttttaaactaatgcctgagcaacacgaacaatacaagcgcatctgtcaccagtacgtaaacgaggagcaccgaggcatccagttaactttcactagtcacaagacactgagcacgatgatgggaagatttctgcagggaatgatacattctttttctcagatcgcccaccataattgggaatgtacaggctgtgcgttgtggcctcatggctgcaatgattatgagggcaagctgaagtgcctgcatggcaatattatgattcagaaggagcagattatcgagatggatgtggccagcgagaacggacaacgagccttaaaggagaatcccgagcgaaccaaaatcacccaaaaccgctggggcagaagtgtggtgcaaatagctaacaatgacgcccgctgctgtgtgaatgatgccggctgtgcagctaaccagttttcgagcaggtcctgcgggatgttttataccgagggtagtaaagcccagcaggctttcaagcaatatgatgctttcatgagagccgtgtatccaggaatcagacaggatcaggccaagatgatactgatccccctgcactgcgattgcaaccacaagcctaattgggtgcccgccatgggtaggcagacctgcaagatgaccccgttcagcattgccaatgctgaagatctggatgtgggcatgattgcagatcccaccgtgctggcaagcgtgagacatccgtcgctgatggtgtttcagtgctgcaatccggtgtaccgcaactctcgcgctcaaagcactggtcctaattgtgatttcaagatttcggctcctgacctgcttggagctttgcagctgaccagaaagctgtggagtgacatcctgcccgatataccggttcccaagttggtgattcccgaattcaagtggcaacccaagtatcagttccgcaacgtatcactgcctgcgggtcattctgattctcgtcagaacccattcgacttgtaaataaataagtaatgcagagccttgatacatgtaaaaaaataaagtgatgtttattgaacacgttgtttacatgagtcattattgaacatccatacggtcgaacgcagtggccctttcgatgtgtgtacgatgggagcgaaaataaggcgaatgggtattaagaaaatggtagagtgctttttgattgtcacacagggtgggctggactttaggagaatgaagcatgttgtttggcactccagttagcaatttcatggtggggtttccgtccatgggacggtcaggccagtgcacaaaggcgtgaaggaacatgcagcagaaaagtccgcaggcggcagaacggggaccctgcacggtctgggtagatttttccagcgtaatacagcggtccttggtagcaagagcgctgcggcgcaggagaccctcatattcaaactggtaaatctgtttgagacgatcatccgagaatccaaaaggatcaaaaaggtagcaggtgttagaacgtgggttccaaccgaaagccaaccagtgctctccccccgtctcacgtccggccgtatttacaatggcacaggcgagcttatcgggggccatgaaccccgggaagcgcttatcgtaggttcccaaaaaatagggtccgcaacccaggtcttggacaatggctctgagctcttgctcgctggagccgttttgggatccgcaggccatggttgcagctgctatttgcaagaagcaagaagcttcttacgtggtagcgttaccggccgagaacggtgtacgcaggtagactgcctcgatgatgccgcggtgtggctgatgcactctgaccacgtcgaaaacttcgaagagaagataaagcagggtgggctcatccatgggatccacctcaaaggtcatgtccagagcatgagctgagttggcatagagcatattctgtcccaagtctgtaagggcccccatagacatgaagttgctcgagaacggtatgcgccacatggttctgtcacacaagaactttttctgcgtaacactatttacggcagttgttccaatgagtggatagggatagttagcgggatagggttgaccttggcgcatggtcggagccatgtaacccacaaagccagagttgttgtgttggtagggtatggcgacggccttgaagtctttgtaattgacctcatcaaccacctgcctgctcatgggctggaagtttctgaaaaatgaatacatgcgatctttgtatccttctggaatgtagaagccctgatagccgatgttgtagttggcgagcatctgtaccaagaaccagtctttggtcatgttgcattgggctacgttgtagccttcgccatccacagtgcgctttatttcaaattcgttaggagatagtaacctgtcatttccaggccagctcactgaagagtcaaacatgatggaaaccttcttaaaagtgtggttcaggtagaaggtaccatccaggtagggaatagaaccagaatagacaaagtaggggtcaaatccagaccccaaagagggagtttctttggttttcagtctggtaaatgaccagcctctgaaagccgcccagttgcgagaaggaatggaaatgggaatattggttgcattggcaggaatggggtagagcatgttagctgcagataggtagtcgttgaatgactgatcattggtgtcattccgcagcatggcttcaagggtggaagcggtgttgtgagccatggggaaaaaagtagcatagaggttgatgctcgtgaaactgatgctggcgccatctacccgcaggtcgttaccgagggaactctgtagaaccatgttcacatccttcctaaagttccactcataagtgtaggagcctgggagaagcagcaggtttttaacagcgaagaatttttgaggcacttgtatgtggaaaggcacataacgtccgttacccagaagcatggatcggtaacgcaagccagcgttacggtggtggttgaatgggttgacattgtccatggcatccagagaccacctggcaccaatgttcacataggtgtctactagagatggcggcaccacccgcccgttcatgtagtcgtaggtgtttttgttttctggaagagtgacattggacggggtgtatttgtacgagtctgggagatatagagccacattggaataaaggaaacttcgccatagattggcttgaaggttaatttccatggcaaacaaattaccctgtccgatctcacttgttccatttacttcaggttccttccaattaggcgcattgtctccatttggaactattgatttgtaactggttgttggaacacctatgccgtccagtggaaaacagtagttgggaagttcatcttccacaccatgattttcaataacacgtacatcaggatcataactgtccacagcctgattccacatgctaaagtatctggttctgtcgcccagagagtcaagcaagagttggtaagaaagttctgtgtttctgtcctgcaagtcaaccactgcatttaactgagacgcttgaccagccagcacccccatgttaccagtactgttatagtacataagtccaataaagttatctctgaagccaatgtagttgggtctgttgggcatagattgttgtcccaaattagcttcggaacttgtgtcttctgttccaggtttgtacactacatgagtgtctggagtttccaaatttacattttctgcatacatgacaattttaggacttaagtttgttttctgcgatgccgcatcaaaaaactccatgtcgatatcatattcgactttctgatttggctgctccgttgttttttgttttgcctgaccgcctttcacattagtaggtttggcaaaggacccgtagcatggtttcatcttagtatcgggtttgagagccctgcctccatacttttcggtttttccatcaaggtcagtccaagtttcatctcccagctgaggttctggctgatatgttttatcagcataaatcggtttactttcttcatctgaaacttccaaacctactgggagtccttcttttgtaatttcagcttcagcttttacaggagcattgccaaaagtgtaagtagtagtattggtttcctcttctgttacgtgttcctcaccagttgtattttttacaccttctgcaatccactgagatgtatttggagcgcctttaggagccagggagttgtaagccgtaccagaatagggtttgaaactgggacctctgtccaacacacccctaatgtcaaagaacgtgctggccatatccagcactctgttgtcgcccacggccagggtgtaccgcactttgtaagagtatgtattgtcctcccggtcaacgggcacgaagcgcaacatgagccgctggctacggtcggtggtcacatcgtgggtcggcgctacggtgggatttctaaacttatttcccagattgaagtaggtgtctgtggcgcgggcgaactgcaccagacccggactcaggtactccgaagcatcctgtccggcgatgtgcatgtatgcccattggggcagcatcgatggggtggccatcttgaaagtaactcagcgtcgacgcacgacctcttccttttttcctctgctgctgtgacggcgtgtaatgacacatatacacagataggcaagttaagcgctactccatatttaattaaaagcagcgacggcgttttacactttgcacgcctagacccacgatgctgttcagagtattttgccagtgcgcatttggacgaggagcgcccccgggacgtgacctggctacggcgactggtttcggggcagcgacaggcttagaagcgggtacagcagtagcagcagggggagggggcaaatccaaggtgacgggtcgatgcaactgagaaggtttcatcaccccggtggccattggggctatcggtctagtggtgggcattccaagcttcgttgcttcctcataagaaggcggttcatctacgcgcgtcaccagcgtctcttccaaatcgggacgcggacgcttgtcgcctcgtttttctggcggaggaatttcttcctccacttgcatttcacctggggttgctggcggcgggtccaaacgactgtttatctttttctgcacagcctggttagccaaatctaccactccattgatgccggaagctatcccatcgactactttttgttggaagttctggtctttaagtttatttctaagcgcctgtcctgtactgctgttccaagctttgttcccgtatgtttttatggttgagccaaaatttttaagcccgctccagatactgctccaattgaaggcgcccccgttcagttggctcgtgccgatgtcgctccaggtgcccatgtacggcttcgtgccgtgtcgcggagccaaggatgaaaaattgatgtcttccatctctaagaaaacatagtcacaggaccaggagtgtcagagtccattgtatttttttttttttatttatacgtttttttccaatgtcaatgtcgttgcgaggcctgaaccgccacggaagctatgcctggtatcgcgccaattgcagcagcgataattggaattaaggctggtaaaaaaccaccccgcaattgcttgcggatagcacgccgtcgcctgtagcgtcgcattccgcgtcccaacatccctcttctacggcgcgagtttcttcctcggtaaccagtgatgggaacgcgaaggcgacaagtgagggccatatctgcaaggaggcagcggcaacattgattaagtgatgatactcggatggtaacgcgcacgcggcagtgtcaaaggttccgcactaccattgcggtacacttgccgcaccagggcgccgggagtcggtttgcttgtgcgtctacggcgacgactgcgatttgcaggtgtcttgcggcgacggcgggaggtactgtttcggctgcgatagtagcgagtgcctcggtaaccaggagtaggaataatagatgggtgtacaacataattgggcatcaacagacttgctggaccgtactttcgtcgggatcttcgagtgggaccggcggcgtcagttgtaataggcatgggcatccatggatccgtttgcacttcagtggaggtggcagtaggctttgcgggttcagtttgcacttccatactttcagtgggaatcttaatgtctacagtttgtacccccagaccaggcgctacctgcttaatgggtctcactttaacctcaggttgaatatctggatccacttttactttctccaaaacgtcctccaacttctggcgtttgggtaccatcagttgcatagtgggatacaaatcttcaccttcgcgtttaacacctgttcgcggagttacgggtaacacttgctgcaaagtgaccggtttaagactaggggtgggatttccatgatccaagggtatcgacactgtctcatccttggaagttattctactacgcttgccataagcaaactcgcctaatcggtcagccgcctgctcaagaatatcatcatccccgtacacctcatcataggaacgcttaaaagtagcgcttgaacgctcgccgggtgtaaagaccaccgaagttccaggtctcaacacatgtcgaactttgcgcccacgccattgcacgcgtcgccgtggggcaaactcgcgcacaaactccgccagcccatcatcgccatcttcctcttcttttttgtcctttttaacccgcttgattttgcggggttttttttcatccttcaacggttggccgtagacttcaggtgcgataacctgcagcatttcttccttgtatttgcgcttggacatcctcgccgctgggacacaacatcggagactgctcagtatcttctaagtgcgagggggacgggtgcgcacgggtacacgttgaccggtggcagcgtcacgcacccagtatacattgcctcttcgcgattgggccatgtcggcaatagtcgccgctgcgacagcggctgcttgcctgcgggacctgccggcgctggcgcccgaagctgcacgtctggccgccctaagcatggctcttcgccccacgcgtctagctcttcgtagcagagctcttgcggctcgcatggcagtggtagctcggtggcgtctggcaatgcgccttcgccggctcttacgtcgagcatagttgcgagcgtcagccactacactgtcaataactgcatccacagtagatgtaggcgcagtaggagtataattacgggcgtcggcaaccacctgatcgattacatcatcgacggtggttcgaacgcgagtgcggcccttgagggcgccccatggagcgcgaaaatgtccgcgaacacggacaggatgttgggtagaacgtttgcgtgcgcctccgtacatcttgcttggagcgcgcagaccccaaccggtgttattactgggcgagataagaatggacattttttttttttttagaaagtgcggcttgaaaggacgcgcggtgcgactatgcccagtgccttgtacacgtagggacaggtgcggcgtctggcgtcagtaacggtcacacgttggactccccggatactgctgcgcaacggcagggtcccgtgatctgtgagagcaggaacgttttcactgacggtggtaatggtgggcgccggcggacggattaaaatctggttctcaggaaagcggttgaagacgtgcgtaagcgaggtggactggcggagctgctgggagtacacagcttgttcgttgtagaagctctttgagaagacgggcataagctctgcacccaccacagggtagttactgacttgtctagtggagcggaaagtgacaggatccttcatcatgtctggaagcgaccagtagacctgctctgctccgcaggtgacatctgaggtggtgagcaatgtccaggaacgcactcctttttcgggatcgccataattgtacgaaagataccaactgcgataggctgtgttgattttgtcttccaacacattatagcttctattcttactatctttttctacaggttgaatagtgagtttcacgtccgttccttcagacacatcggccaataatgattctgcagtcggaacaggtgttggcgcaaaattgtctcctctgacctctccagcgttagcaacccttgtagagtcgctggcaactatgtttgccttagcttctgcagcagctgtagcagcttctattttggctttttgttctttcttactgttctcataggcatctacatccaagagggccggaatattaccaccttctaaatcttcatacaaaatcttaaaaccctcttgaaatggctgtttttttctgataccaagaaggttgctcaaacgactctcggtaaaatccactccgcagccaggcagtaagacaatgtcaggatggaaggcttcatacgtatacactccaggcatgatcaacttggtttcgggatcccatcccagcttgaagttcctggtgtcgaacttaacaccaatgtcactttcaagcactccattctgtctacccactttcaagtaattatctatgatggcattgttcatcaaatcaatagtcatagtaactgaaaagttgccttctggcaaagtaaactcgaaccactcatatttcaaaatatcctgcttgtgatcataagtatccccaactgcagcaccgtcgggaggttttctggacaccatcacacgcgctttgaacttgttactaaacatatactcgttcacgtttggcatgttagtatgcatgatggtctttagctgaccgccccaccgcgatcgttcatcaaagttaatggtctgggtgctggcttccgtaggggtaaagtcattgttttgcaccaccgtggtcaagaagttgctgtggtcattctgatagttcagagaagcaatgtccgccgacttgttgtccaccagatacaacctggtggtatcgtactgaggtgccagttccgaataacgaatgctgtttctgccctccgtaggtgccaggtatcgcggaggcacaaagggagcctccagtggggattgcatcaccgccgtcgcctgctgctgctgcatcacgctctcgtacgaaggaggaggaccctccggatacaccaccgctccgcctagcacgactcgcctcattatactagacacagataataaagaagaacgaacgtacgctcgtcgccatggccttggtgagttttttttttatttttttttacaacataccacccaagcgagggcgcaaatgagcaaacgggttgccccttcctctcccacccaagtccagcacgctgctatcatcggccgaatcctcatcgtcccacacaagacccctctgtctgtcatggcgctggcgtctacggctcgctctacttgtaatccccatgatcccaggctcgtctctgtgatcctgagcataagtcttccatctactcattttatccaccaaactttctattccattgtttgggaaatttttttctcttgccggtctgagcaaggaatcgtttagatactcctcttcgcccattaaactcgggcgacttattctacccacttcgctgctacgtacactgtgtagagaaaagggtagactaggaaaaggacttgcagactcgggctcagccgcggtagcacccatgaccccggacagcgatgcagaagaatgcattctatcgccgccttcctttttccacgtgcgatgatcagaaagaggtgaaaaaacatcgctgtccacgtcgtcccacagaaatccgtcattagggtcgggcatgtcatattcgcccgtgtagaaaccaggtgggggcagccagtgcgggtttaagatggcattggtgaaataatcagagttcatagcggcagctctgtgcaagtagtccagcagtttgttaatgaaaggtcggttactggcatacatgctgggctccatatttcgcgctgtcatgtccagtgctgcagtcggagttgccccctcttgcatcagaaacaatcccacgctctgctgcacatatctaaggatcctctcctcctccgcagtaagagcatattgaggagggatcttttgagaccgattggtaagcaagaagttcagagtggcttccaaactgccagtgtcttcctgtcccaaagcgcgactgacttgggtaatttcttgataggtctgctcgtccacctgactttgccctatggcttcgcgatacaggtttagtaggtaacccaaataggaattacggtcgatgctaccgctgtcggtgaaaggagctaccaacagtaataataggcgggagttcggagttaacaagctagacacggttgctctttctcctaccggggcatgcactccccacaaacctttaaggtttttaaaagcttggctcagatttaccgtctgcaagccctgtctgctagtctgaaagaagtaatcaggaccggactgatacacttcgctctgaggtacttctgataccatcagtctcaaagcgcttaaaaagttagtataatcctgttgaccacgcggcacattagcaggctgagtactcaagaaagcatttaacgccaccagcgaacccaggttggcatcacgctggaacctttcgcgctgagacacggcttcgcgtacatctgttatcatacggtccaaattggtttgcacattgctactgttgtagcgagccacgcgttctaagagagcgttgtataccagtccggcctcatctggacgaatagctttgttctccaccaacgcgttcacgatggccaggaccttctcatgagtgggattagagcgggaaggcactacagcttccatgatggccgatagacggttggcctggggttgctgtctaaaggcttcggggttgcgagtcgtcaacgccatgatacgttgcatggcctgggtccaatcgtccgaggagttaatgccggacggctggctctgcagcgccgcccgcattgcgggatccggtgcttgctgttccatctagcaaaaaacacgggttgtgccatcagtcttccaagtactcgccctcttcctcctcgccttcatccgcctcttctatgtaaggaagctcacatcctgccgtcgcggcgctcagagccctgcgactaggctgccactgcaagtcagctcccatgtcgaagtaattctcaccctcggttccagctccagtcagagctctttgcaaactgtgcatcagttccctgtcgcttaactcgcgcctcctgctggcgctaaccgcgcgatgcattctgtcattgcgatacaccccaagatcatcgctcagggtcaagaccttgagcgtcatgcgcatgtagaacccatctatcttcacctccttgtctatgggaacgtatggagtcttgtagattttgcgagcgtaatattttcccaagctcaaaaccgagtaattgatggcagccaccttctcggccaggcccaggctccgctcctgcactatgatactctgtagaatgttgataagatcatacaaccatctcccctcgggttcggtgatgttcagcagcgcctctctgaaagcctcattgtctctgctgtgttgcaccaccagaaacagctgggcggtcagaggtttgctagtagggttctgaatgatagcttccatcaaatcccacaaatgcatcaaaccaagggtaacttcttcgcgggcaatcagggttcgcacatgattattaaaagacttttggaagttacgctcttcctttactgtctgctcgtaagccgatacaaggttggctgcagccacgtgtgccctggcaggactgatccctgtcatttcatcaacttcgaaatcctcgtcccgcaacactcgtcttcggtccaaaccgtgacgcagctcacgacccgcgttaaagcgggaagctcgcatctcctccggctcctcgccgcttctgtctctaaataggttctgttggggcacatacgcctcgcgagaatcttttttcagttgaactcgcggatgccgctcgggtgaaggcgcacctagacgtgccagtccttcgccctcttccaagtccagatcataggcgggctgtcccgcaccgctcacggcggcagttgcagtagttgcagggacagccttttgtgattgctgctgctgctgctgcgaggggggctgttgttgggggcgcatctgtcgcagcacgggatgcatctgagcggcaaaaaaaaaaaataggactcacttccctgccattcggaaaccagcaaaacgactcgattccgtatcctggatttttgtaggctgggtcgagacgggagtgccaataccacgttagccgcggctccggccggctcgagtacaagtctcgaaccggggtacaccgcgacccaacccgttcacgttcctccaggctacggagtcgagtcgctgaacgctttcattttctccgtgtctatagagcatcaatgactgcgcgcgcctcactggtcaaaccgtgcctacaatgaactacttcatgccgctacgcaacatttggaaccgcgtacgcgagtttcctcgggcttctactaccgccgcaggaatcacctggatgtccaggtacatctacggctatcaccgccttatgttggaagacctcgcccctggcgctccagctacagaacgatggcctctctaccgccaaccaccgccgcattttcttatagggtaccagtatctggtgcgcacctgcaacgattacatctttgacacccgcgcctattcgcgccttaaatacaccgagctcgtgcgccctggtcaccagacagttaactggtcagtcatggccaactgtgcttacaccattaatacaggagcttaccaccgctttgtggattttgatgactttcaagccacccttacccaagtacagcaagccatcctcgccgaaagagtcgtagctgacttggcactggtacaaccaatgcgcggatttggactcacacgtatgcatggcagaacgggtgaggaagaagtgcccgtagaacggctcatgcaagactactacaaagatcttgctagatgtcaggataatgcttggggaatggccaatcgcctgcgtatccagcaagccggacccaaagacctggtgctcctcgccaccatccgccgtcttagaactgcctactttaatttcatcaccagcagcatcgtctcaccttcccgagatgaagaagaaacagaagacccagaccgaacacataaccacccccgcccacaagaagccgtactcagcctaccttgtgactgtgactggttagacgctttcgtcgaaaggttttcagatcccgtggatcttgacacgatcagatctctgcgtgcagtccctacgggccaattaataaaatgtataatcagcgccctctccctcccaaacggagaacctcccagtcaccactttaaggagatgcgcggcggtgtttttactctgcgaccgcgcgagaacggccgcgccgtcactgaaaccatgcgccgccgccgcggagaggtcattgaacgattcatcgaccgtttgcccgtgcgccgtcgacgtcgccgcgtgccccctccgcccccgcctgaagacgaagaagagatgttagtggaagaagagatagaagaggaagaagagatcccgggagccttcgaacgcgaagtacgggccaccatagccgaactcatccgtcttctcgaggaggaattgaccgtgtccgcgcgaaactcccagttttttaattttgccgtggacttctacgaggccatggagcgcttggaagctctgggcgatgttagcgaaatgccgctgagacgatggatcatgtatttcttcgtcgccgaacacattgccaccacactcaactacctttttcagcgcctatgcaactatgcggtcttcaccagacacgtggagcttaacctcgctcaggtggtgatgcgcgcaagagactccgagggggccgtggtttacagccgcgtctggaacgaggcgggcatgaatgcattctcccaactcatgggccgtatctccaatgacctcgcggccaccgtcgaaagagcgggtcgcggagatcttcaggaggaagaaatcgagcagttcatggcggagatcgcctaccaggacaactctggtgacgtacaagaaatactgagacaagctgccgttaacgataccgaaattgattctgttgaactctctttcaggttcaagctcacggggccggtagctttcacccagagacgtcagatacaagacgtcaatcgacgcgtggtggcgcacgcaagtcttctcagagcgcagtaccagaacctgcccgtgcgcggcgccgacgtgccactaccagccatgccctcgggtccggaacaaccgctgccgcccggcgcgcgtccccgtcaccgcttctgagcatgcaagaagcaagagagccaccaccgatcaaaagaaaaaacaaaggtacggtagtggcgcccaaaggacacggaaccctgcaagccattgacgtctctacaaacgaacctgtggaaatcaagtaccatctgaacctcccgcacgccctggaaaagatcatgcaagttaatcttctgtccctacctactaacctgagtccgcagcgtctcaggactctggacagctccagcctgcgcgctctcgtccttcagctccgcccctcccgcgccgaggtctggacttgcctcccgcgggggctcgtcagcatgaccaccatcgaaacagaagatgaacaggccgatacagcgaatatagaagagcacgagatacaatcgccaggcctcggcttcccactgaaatttctcgtcaagggaagccaggtacaactcattcacgagatacaacccgtgcaacgctgcgactactgcggccgtctgtacaagcacaaacacgaatgctcggcgcgccgcagaaacttctacttccatcacatcaacagccaatcctccaactggtggcaggaaatccagttcttcccgatcggctctcatcctcgcacagaaagactcttcctgacctacgatgtggaaacttacacctggatgggatcctttggcaaacaactagttcctttcatgctggtcatgaaactctcaggagaagagcgtctcgtcaacatggcccacgatctagccattaaactcaagtgggatcgatggcaacaagaccccagaaccttctactgtgtcactccagaaaaaatggcaattggccggcattttcgtcagtatcgggaccagttacaaacagcactggcggtagatctttggtcatcattcctacatgcaaatcctcacctgcacgaatgggctctcgaacactacgccttatctgaccccacagacctaacctttgatgagctcagtaagctacctcacgtcagaggcacgccgcgtttcatagaattatacatcgtaggacacaacatcaacggtttcgacgagatcgtcctagctgcccaggtgatcaacaatcgagcggaagtaccacagccttttcgcatcactcgcaattttatgcccagagccggtaagattctcttcaatgatgttactttcgctttgcccaaccccgcctacaagaaacgggtagacttccaactctgggaacagggagcctgtgacgacatcgacttcaaataccaatttctcaaagtcatggtcagagacacctttgcccttactcacgcttcgctacgaaaagctgctcaagcatactctctacccgtagagaagggctgctgcccttacaaggcagttaatcagttctacatgctaggatcttaccgtgcagacaaagacgggtttccgctagaagagtactggaaggatcgcgaagaataccttctcaaccgcgaactgtgggaaaagaaaaaccaaccaggttatgacatcattcaagaaacacttgactactgcgccctagacgtacttgtcaccgccgaactggtaaccaagcttcaagaatcttatgcccactttgtcagagactctgtaggtctacctcatgcccatttcaacatttttcaaagacccaccatctcttccaattctcacgccatctttcgccagatcgtctacagaacagaaaaacccaatcgcaccaacttgggtccggggctgctagcgccatcacatgaactatatgactatgtgcgagcaagtatcagaggggggcgatgctatccaacctacataggcatctttgaggatcccatctacgtctatgacatctgtggcatgtatgcctctgcactcacccatcccatgccatggggcagtccccttaacccatatgagcgcgcactggcagctcgagaatggcaaatggccttagatgaccccactcccatcagctattttgataaggatttacttccgggaatctttaccatggatgcagaccctcccgatgaacttatgctagacccacttccccctttctgttctaggaaaggaggtaggctctgttggaccaatgaaccccttcgaggcgaggtggccaccagtgtggatttaattaccttgcataatcgagggtggcaagtgagaatcgtgccagatgaattaacaactatcttccccgaatggaagtgcctggcacgcgagtatgtccaactcaacatcgccgccaaagagcgcgcggacaaggaaaagaaccaaaccatgcgatccattgccaaacttttatccaacgccctgtatggatcatttgccaccaaacttgacaataaaaaaattgtgttttctgaccaaatggacgaaaacctcatgaaaggcatctcaaccggcactgtcaatatcaaatcctcctcgttcttagaaactgacaacctgagtgcagaggtcatgcccgccttcgagagggaatacctaccccaacagctgacgttcctggacagcgatccggaagacagtgaggaagagcaaagaaccgcccccttttatacccccccagcggggaccccaggtcacgtgaaatacacctacaagccaatcacattcctggatgttgaagagggtgacatgtgtttgcatactttggaaaaggtggaccccctggttgacaacgatcgctacccctcccacatagcctcctttgtgctggcctggacgcgcgcctttgtatcagagtggtcagagttcctgtacgaagaagaccgaggcactccactggagaagaggcctgtaaaatcagtctacggggacacggacagcctgtttgtcactcaacgaggacacgaactcatggagaccaaaggtaagaaacgcatcaaaaaatatggcggaaaacttgtttttgaccccaatgaaccggatttaacctggctggtggaatgtgaaactgtttgcgcctcctgcggcgcagatgcatactccccagaatccgttttccttgcgcccaagttgtatgcgctgaaatgcctatactgcccggtatgcaagaaaacttccaaaggtaagctccgcgccaaaggccacgcagccgaggcgctcaactacgaactcatggtaaactgctacttggccgacatacagggcgccaagcgacagaagttttcgaccagcaggatgagtctgaagcgcaccctggcaagcgcccaagcaggcgcacaccccttcactgtgacggaaacaaccctgactcgaacactgagaccctggaaggaccgaaccctggcagcgctggacgcccatcgtctcataccctattccaggagccgtccaaacccgcgaaacgaggaggtctgctggatcgagatgccatagaacacatcactgaactgtggaacagactagaacttttgcagcaaactctctccaaaatgcccatggctgacggtctgaaaccgctgaaaaacttttcctcactacaagaacttctatcactaggaggagagcgcctcctaatggatttggtgcgggaaaatatgcatgtaagggaaatgatgaacgaggtggcccccttgcttcgagaagacggcagttgccgttccctaaactaccacctgcaacccgtaatcggaatcatttatggccccaccggatgtggcaaatctcaattgctcagaaatttgctatcatcacaattaatcacccccgccccagaaacggtgtttttcatagccccccaggtggacatgattccaccctcggaactgaaagcttgggaaatgcaaatctgtgaggggaactatgctccggggcccgaaggaacattcataccccaatctggtactctccgccccaaattcattaaaatggcttatgatgatttaactcaggaacataactatgatgtgtcagacccacggaacgtgtttgcccgcgccgctgcccacggccccattgctattatcatggatgagtgcatggaaaatcttggaggacacaagggtgtctccaaatttttccacgcttttccatccaagctgcacgataaatttcctaaatgtaccggatacaccgtcttggtggtccttcataacatgaacccaagacgggatcttggcggcaatattgccaacttaaaaatccaatccaaaatgcacataatttcaccccgaatgcacccatcccagctcaaccggtttgtaaacacctacaccaagggcttatctgtggcaatcagcctacttctaaaagatattgtgcaacaccatgcactgcgaccttgttatgactgggtgatttacaacactaccccggagcatgaatcccttcaatggagctatctccaccccaaagacggcctaatgcccatgtatctaaacattcaatcccacctctataggatcctggaaaaaatccaccgagttctcaatgatagagatcggtggtctagggcataccgtgcgcgaaaaatgaaataaa

SEQ ID NO: 142 - DNA, 3759 bp, Human adenovirus
  misc_feature 1..3759: note = Human adenovirus 11, Ad11 E3
  source 1..3759: mol_type = genomic DNA
tataaaacgcctgatgatcagaggccgaggtatccagctcaacgacgagtcggtgagctctccgcttggtctacgaccagacggaatctttcagattgccggctgcgggagatcttccttcacccctcgtcaggctgttctgactttggaaagttcgtcttcgcaaccccgctcgggcggaatcgggaccgttcaatttgtggaggagtttactccctctgtctacttcaaccccttctccggatctcctgggcattacccggacgagttcataccgaacttcgacgcgattagcgagtcagtggacggctacgattgatgtctggtgacgcggctgagctatctcggctgcgacatctagaccactgccgccgctttcgctgctttgcccgggaactcattgagttcatctacttcgaactccccaaggatcaccctcaaggtccggcccacggagtgcggatttctatcgaaggcaaaatagactctcgcctgcaacgaattttctcccagcggcccgtgctgatcgagcgagaccagggaaacaccacggtttccatctactgcatttgtaatcaccccggattgcatgaaagcctttgctgtcttatgtgtactgagtttaataaaaactgaattaagactctcctacggactgccgcttcttcaacccggattttacaaccagaagaacgaaacttttcctgtcgtccaggactctgttaacttcacctttcctactcacaaactagaagctcaacgactacaccgcttttccagaagcattttccctactaatactactttcaaaaccggaggtgagctccaaggtcttcctacagaaaacccttgggtggaagcgggccttgtagtgctaggaattcttgcgggtgggcttgtgattattctttgctacctatacacaccttgcttcactttcttagtggtgttgtggtattggtttaaaaaatggggcccatactagtcttgcttgttttactttcgcttttggaaccgggttctgccaattacgatccatgtctagacttcgacccagaaaactgcacacttacttttgcacccgacacaagccgcatctgtggagttcttattaagtgcggatgggaatgcaggtccgttgaaattacacacaataacaaaacctggaacaataccttatccaccacatgggagccaggagttcccgagtggtacactgtctctgtccgaggtcctgacggttccatccgcattagtaacaacactttcattttttctgaaatgtgcgatctggccatgttcatgagcaaacagtattctctatggcctcctagcaaggacaacatcgtaacgttctccattgcttattgcttgtgcgcttgccttcttactgctttactgtgcgtatgcatacacctgcttgtaaccactcgcatcaaaaacgccaataacaaagaaaaaatgccttaacctctttctgtttacagacatggcttctcttacatctctcatatttgtcagcattgtcactgccgctcatggacaaacagtcgtctctatccctctaggacataattacactctcataggacccccaatcacttcagaggtcatctggaccaaactgggaagcgttgattactttgatataatctgcaacaaaacaaaaccaataatagtaacttgcaacatacaaaatcttacattgattaatgttagcaaagtttacagcggttactattatggttatgacagatacagtagtcaatatagaaattacttggttcgtgttacccagttgaaaaccacgaaaatgccaaatatggcaaagattcgatccgatgacaattctctagaaacttttacatctcccaccacacccgacgaaaaaaacatcccagattcaatgattgcaattgttgcagcggtggcagtggtgatggcactaataataatatgcatgcttttatatgcttgtcgctacaaaaagtttcatcctaaaaaacaagatctcctactaaggcttaacatttaatttctttttatacagccatggtttccactaccacattccttatgcttactagtctcgcaactctgacttctgctcgctcacacctcactgtaactataggctcaaactgcacactaaaaggacctcaaggtggtcatgtcttttggtggagaatatatgacaatggatggtttacaaaaccatgtgaccaacctggtagatttttctgcaacggcagagacctaaccattatcaacgtgacagcaaatgacaaaggcttctattatggaaccgactataaaagtagtttagattataacattattgtactgccatctaccactccagcaccccgcacaactactttctctagcagcagtgtcgctaacaatacaatttccaatccaacctttgccgcgcttttaaaacgcactgtgaataattctacaacttcacatacaacaatttccacttcaacaatcagcattatcgctgcagtgacaattggaatatctattcttgtttttaccataacctactacgcctgctgctatagaaaagacaaacataaaggtgatccattacttagatttgatatttaatttgttctttttttttttatttacagtatggtgaacaccaatcatggtacctagaaatttcttcttcaccatactcatttgtgcatttaatgtttgcgctactttcacagcagtagccacagcaaccccagactgtataggagcatttgcttcctatgcactttttgcttttgttacttgcatctgcgtatgtagcatagtctgcctggttattaattttttccaacttatagactggatccttgtgcgaattgcctacctgcgccaccatcccgaataccgcaaccaaaatatcgcggcacttcttagactcatctaaaaccatgcaggctatactaccaatatttttgcttctattgcttccctacgctgtctcaaccccagctgcctatagtactccaccagaacaccttagaaaatgcaaattccaacaaccgtggtcatttcttgcttgctatcgagaaaaatcagaaattcccccaaatttaataatgattgctggaataattaatataatctgttgcaccataatttcatttttgatataccccctatttgattttggctggaatgctcccaatgcacatgatcatccacaagacccagaggaacacattcccctacaaaacatgcaacatccaatagcgctaatagattacgaaagtgaaccacaacccccactactccctgctattagttacttcaacctaaccggcggagatgactgaaacactcaccacctccaattccgccgaggatctgctcgatatggacggccgcgtctcagaacagcgactcgcccaactacgcatccgccagcagcaggaacgcgcggccaaagagctcagagatgtcatccaaattcaccaatgcaaaaaaggcatattctgtttggtaaaacaagccaagatatcctacgagatcaccgctactgaccatcgcctctcttacgaacttggcccccaacgacaaaaatttacctgcatggtgggaatcaaccccatagttatcacccagcaaagtggagatactaagggttgcattcactgctcctgcgattccatcgagtgcacctacaccctgctgaagaccctatacggcctaagagacctgctaccaatgaattaaaaaatgattaataaa

SEQ ID NO: 143 - DNA, 978 bp, Human adenovirus
  misc_feature 1..978: note = Human adenovirus 11, Ad11 fiber
  source 1..978: mol_type = genomic DNA
atgaccaagagagtccggctcagtgactccttcaaccctgtctacccctatgaagatgaaagcacctcccaacacccctttataaacccagggtttatttccccaaatggcttcacacaaagcccaaacggagttcttactttaaaatgtttaaccccactaacaaccacaggcggatctctacagctaaaagtgggagggggacttacagtggatgacaccaacggttttttgaaagaaaacataagtgccaccacaccactcgttaagactggtcactctataggtttaccactaggagccggattgggaacgaatgaaaataaactttgtatcaaattaggacaaggacttacattcaattcaaacaacatttgcattgatgacaatattaacaccttatggacaggagtcaaccccaccgaagccaactgtcaaatcatgaactccagtgaatctaatgattgcaaattaattctaacactagttaaaactggagcactagtcactgcatttgtttatgttataggagtatctaacaattttaatatgctaactacacacagaaatataaattttactgcagagctgtttttcgattctactggtaatttactaactagactctcatccctcaaaactccacttaatcataaatcaggacaaaacatggctactggtgccattactaatgctaaaggtttcatgcccagcacgactgcctatcctttcaatgataattctagagaaaaagaaaactacatttacggaacttgttactacacagctagtgatcgcactgcttttcccattgacatatctgtcatgcttaaccgaagagcaataaatgacgagacatcatattgtattcgtataacttggtcctggaacacaggagatgccccagaggtgcaaacctctgctacaaccctagtcacctccccatttaccttttactacatcagagaagacgactga

SEQ ID NO: 144 - DNA, 126 bp, Human adenovirus
  misc_feature 1..126: note = Human adenovirus 11, Ad11 fiber tail
  source 1..126: mol_type = genomic DNA
atgaccaagagagtccggctcagtgactccttcaaccctgtctacccctatgaagatgaaagcacctcccaacacccctttataaacccagggtttatttccccaaatggcttcacacaaagccca

SEQ ID NO: 145 - DNA, 273 bp, Human adenovirus
  misc_feature 1..273: note = Human adenovirus 11, Ad11 fiber shaft
  source 1..273: mol_type = genomic DNA
aacggagttcttactttaaaatgtttaaccccactaacaaccacaggcggatctctacagctaaaagtgggagggggacttacagtggatgacaccaacggttttttgaaagaaaacataagtgccaccacaccactcgttaagactggtcactctataggtttaccactaggagccggattgggaacgaatgaaaataaactttgtatcaaattaggacaaggacttacattcaattcaaacaacatttgcattgatgacaatattaacacc

SEQ ID NO: 146 - DNA, 576 bp, Human adenovirus
  misc_feature 1..576: note = Human adenovirus 11, Ad11 fiber knob
  source 1..576: mol_type = genomic DNA
ttatggacaggagtcaaccccaccgaagccaactgtcaaatcatgaactccagtgaatctaatgattgcaaattaattctaacactagttaaaactggagcactagtcactgcatttgtttatgttataggagtatctaacaattttaatatgctaactacacacagaaatataaattttactgcagagctgtttttcgattctactggtaatttactaactagactctcatccctcaaaactccacttaatcataaatcaggacaaaacatggctactggtgccattactaatgctaaaggtttcatgcccagcacgactgcctatcctttcaatgataattctagagaaaaagaaaactacatttacggaacttgttactacacagctagtgatcgcactgcttttcccattgacatatctgtcatgcttaaccgaagagcaataaatgacgagacatcatattgtattcgtataacttggtcctggaacacaggagatgccccagaggtgcaaacctctgctacaaccctagtcacctccccatttaccttttactacatcagagaagacgac

SEQ ID NO: 147 - DNA, 1686 bp, Human adenovirus
  misc_feature 1..1686: note = Human adenovirus 11, Ad11 penton
  source 1..1686: mol_type = genomic DNA
atgaggcgagtcgtgctaggcggagcggtggtgtatccggagggtcctcctccttcgtacgagagcgtgatgcagcagcagcaggcgacggcggtgatgcaatccccactggaggctccctttgtgcctccgcgatacctggcacctacggagggcagaaacagcattcgttattcggaactggcacctcagtacgataccaccaggttgtatctggtggacaacaagtcggcggacattgcttctctgaactatcagaatgaccacagcaacttcttgaccacggtggtgcaaaacaatgactttacccctacggaagccagcacccagaccattaactttgatgaacgatcgcggtggggcggtcagctaaagaccatcatgcatactaacatgccaaacgtgaacgagtatatgtttagtaacaagttcaaagcgcgtgtgatggtgtccagaaaacctcccgacggtgctgcagttggggatacttatgatcacaagcaggatattttgaaatatgagtggttcgagtttactttgccagaaggcaacttttcagttactatgactattgatttgatgaacaatgccatcatagataattacttgaaagtgggtagacagaatggagtgcttgaaagtgacattggtgttaagttcgacaccaggaacttcaagctgggatgggatcccgaaaccaagttgatcatgcctggagtgtatacgtatgaagccttccatcctgacattgtcttactgcctggctgcggagtggattttaccgagagtcgtttgagcaaccttcttggtatcagaaaaaaacagccatttcaagagggttttaagattttgtatgaagatttagaaggtggtaatattccggccctcttggatgtagatgcctatgagaacagtaagaaagaacaaaaagccaaaatagaagctgctacagctgctgcagaagctaaggcaaacatagttgccagcgactctacaagggttgctaacgctggagaggtcagaggagacaattttgcgccaacacctgttccgactgcagaatcattattggccgatgtgtctgaaggaacggacgtgaaactcactattcaacctgtagaaaaagatagtaagaatagaagctataatgtgttggaagacaaaatcaacacagcctatcgcagttggtatctttcgtacaattatggcgatcccgaaaaaggagtgcgttcctggacattgctcaccacctcagatgtcacctgcggagcagagcaggtctactggtcgcttccagacatgatgaaggatcctgtcactttccgctccactagacaagtcagtaactaccctgtggtgggtgcagagcttatgcccgtcttctcaaagagcttctacaacgaacaagctgtgtactcccagcagctccgccagtccacctcgcttacgcacgtcttcaaccgctttcctgagaaccagattttaatccgtccgccggcgcccaccattaccaccgtcagtgaaaacgttcctgctctcacagatcacgggaccctgccgttgcgcagcagtatccggggagtccaacgtgtgaccgttactgacgccagacgccgcacctgtccctacgtgtacaaggcactgggcatagtcgcaccgcgcgtcctttcaagccgcactttctaa

SEQ ID NO: 148 - DNA, 2847 bp, Human adenovirus
  misc_feature 1..2847: note = Human adenovirus 11, Ad11 hexon
  source 1..2847: mol_type = genomic DNA
atggccaccccatcgatgctgccccaatgggcatacatgcacatcgccggacaggatgcttcggagtacctgagtccgggtctggtgcagttcgcccgcgccacagacacctacttcaatctgggaaataagtttagaaatcccaccgtagcgccgacccacgatgtgaccaccgaccgtagccagcggctcatgttgcgcttcgtgcccgttgaccgggaggacaatacatactcttacaaagtgcggtacaccctggccgtgggcgacaacagagtgctggatatggccagcacgttctttgacattaggggtgtgttggacagaggtcccagtttcaaaccctattctggtacggcttacaactccctggctcctaaaggcgctccaaatacatctcagtggattgcagaaggtgtaaaaaatacaactggtgaggaacacgtaacagaagaggaaaccaatactactacttacacttttggcaatgctcctgtaaaagctgaagctgaaattacaaaagaaggactcccagtaggtttggaagtttcagatgaagaaagtaaaccgatttatgctgataaaacatatcagccagaacctcagctgggagatgaaacttggactgaccttgatggaaaaaccgaaaagtatggaggcagggctctcaaacccgatactaagatgaaaccatgctacgggtcctttgccaaacctactaatgtgaaaggcggtcaggcaaaacaaaaaacaacggagcagccaaatcagaaagtcgaatatgatatcgacatggagttttttgatgcggcatcgcagaaaacaaacttaagtcctaaaattgtcatgtatgcagaaaatgtaaatttggaaactccagacactcatgtagtgtacaaacctggaacagaagacacaagttccgaagctaatttgggacaacaatctatgcccaacagacccaactacattggcttcagagataactttattggacttatgtactataacagtactggtaacatgggggtgctggctggtcaagcgtctcagttaaatgcagtggttgacttgcaggacagaaacacagaactttcttaccaactcttgcttgactctctgggcgacagaaccagatactttagcatgtggaatcaggctgtggacagttatgatcctgatgtacgtgttattgaaaatcatggtgtggaagatgaacttcccaactactgttttccactggacggcataggtgttccaacaaccagttacaaatcaatagttccaaatggagacaatgcgcctaattggaaggaacctgaagtaaatggaacaagtgagatcggacagggtaatttgtttgccatggaaattaaccttcaagccaatctatggcgaagtttcctttattccaatgtggctctatatctcccagactcgtacaaatacaccccgtccaatgtcactcttccagaaaacaaaaacacctacgactacatgaacgggcgggtggtgccgccatctctagtagacacctatgtgaacattggtgccaggtggtctctggatgccatggacaatgtcaacccattcaaccaccaccgtaacgctggcttgcgttaccgatccatgcttctgggtaacggacgttatgtgcctttccacatacaagtgcctcaaaaattcttcgctgttaaaaacctgctgcttctcccaggctcctacacttatgagtggaactttaggaaggatgtgaacatggttctacagagttccctcggtaacgacctgcgggtagatggcgccagcatcagtttcacgagcatcaacctctatgctacttttttccccatggctcacaacaccgcttccacccttgaagccatgctgcggaatgacaccaatgatcagtcattcaacgactacctatctgcagctaacatgctctaccccattcctgccaatgcaaccaatattcccatttccattccttctcgcaactgggcggctttcagaggctggtcatttaccagactgaaaaccaaagaaactccctctttggggtctggatttgacccctactttgtctattctggttctattccctacctggatggtaccttctacctgaaccacacttttaagaaggtttccatcatgtttgactcttcagtgagctggcctggaaatgacaggttactatctcctaacgaatttgaaataaagcgcactgtggatggcgaaggctacaacgtagcccaatgcaacatgaccaaagactggttcttggtacagatgctcgccaactacaacatcggctatcagggcttctacattccagaaggatacaaagatcgcatgtattcatttttcagaaacttccagcccatgagcaggcaggtggttgatgaggtcaattacaaagacttcaaggccgtcgccataccctaccaacacaacaactctggctttgtgggttacatggctccgaccatgcgccaaggtcaaccctatcccgctaactatccctatccactcattggaacaactgccgtaaatagtgttacgcagaaaaagttcttgtgtgacagaaccatgtggcgcataccgttctcgagcaacttcatgtctatgggggcccttacagacttgggacagaatatgctctatgccaactcagctcatgctctggacatgacctttgaggtggatcccatggatgagcccaccctgctttatcttctcttcgaagttttcgacgtggtcagagtgcatcagccacaccgcggcatcatcgaggcagtctacctgcgtacaccgttctcggccggtaacgctaccacgtaa

SEQ ID NO: 149 - protein, 325 aa, Human adenovirus; identical to SEQ ID NO: 67
  REGION 1..325: note = misc_feature - Human adenovirus 11, Ad11 fiber

SEQ ID NO: 150 - protein, 91 aa, Human adenovirus
  REGION 1..91: note = misc_feature - Human adenovirus 11, Ad11 fiber shaft
NGVLTLKCLTPLTTTGGSLQLKVGGGLTVDDTNGFLKENISATTPLVKTGHSIGLPLGAGLGTNENKLCIKLGQGLTFNSNNICIDDNINT

SEQ ID NO: 151 - protein, 192 aa, Human adenovirus
  REGION 1..192: note = misc_feature - Human adenovirus 11, Ad11 fiber knob
LWTGVNPTEANCQIMNSSESNDCKLILTLVKTGALVTAFVYVIGVSNNFNMLTTHRNINFTAELFFDSTGNLLTRLSSLKTPLNHKSGQNMATGAITNAKGFMPSTTAYPFNDNSREKENYIYGTCYYTASDRTAFPIDISVMLNRRAINDETSYCIRITWSWNTGDAPEVQTSATTLVTSPFTFYYIREDD

SEQ ID NO: 152 - protein, 561 aa, Human adenovirus; identical to SEQ ID NO: 68
  REGION 1..561: note = misc_feature - Human adenovirus 11, Ad11 penton

SEQ ID NO: 153 - protein, 948 aa, Human adenovirus; identical to SEQ ID NO: 69
  REGION 1..948: note = misc_feature - Human adenovirus 11, Ad11 hexon

SEQ ID NO: 154 - protein, 42 aa, Human adenovirus; identical to SEQ ID NO: 136
  REGION 1..42: note = misc_feature - Human adenovirus 11, Ad11 fiber tail

SEQ ID NO: 155 - DNA, 137 bp, Human adenovirus
  misc_feature 1..137: note = Human adenovirus 14, Ad14 5? (left) ITR
  source 1..137: mol_type = genomic DNA
catcatcaataatataccttatagatggaatggtgccaatatgtaaatgaggtgattttaaaaagtgtgggctgtgtggtaattggctgtggggttaacggctaaaaggggcggcgcggccgtgggaaaatgacgtt

SEQ ID NO: 156 - DNA, 137 bp, Human adenovirus
  misc_feature 1..137: note = Human adenovirus 14, Ad14 3? (right) ITR
  source 1..137: mol_type = genomic DNA
aacctcattttcccacggccgcgccgccccttttagccgttaaccccacagccaattaccacacagcccacactttttaaaatcacctcatttacatattggcaccattccatctataaggtatattattgatgatg

SEQ ID NO: 157 - DNA, 342 bp, Human adenovirus
  misc_feature 1..342: note = Human adenovirus 14, Ad14 Packaging Sequence
  source 1..342: mol_type = genomic DNA
ttttgggggtggagtgtttttgcaagttgtcgcggtaaatgtgacgcaaacaaaggctttttttttacggaactacttagtgttcccacggtatttaacaggaaatgaggtagttttggccggatgcaagtaaaaattgttcattttcgcgcgaaaactgaatgaggaagtggttttctgaataatgcggtatttatggcagggtggagtatttgttcagggccaggtagactttgacccattacgtggaggtttcgattaccgcggaggtttcgattaccgtgttttttacctaaatttccgcgtaccgtgtgaaagtcttctgtttttacgtaggtgtca

SEQ ID NO: 158 - DNA, 3468 bp, Human adenovirus
  misc_feature 1..3468: note = Human adenovirus 14, Ad14 E1
  source 1..3468: mol_type = genomic DNA
gctgatcgctacggtatttatacctcagggtttgtgtcaagaggccactcttgagtgccagcgagaagagttttctcctctgcgccggcagtttaatattaaaaaaaatgagacacttgcgatttatgcctcaggaaataatttctgctgagactggaaacgaaatactggagtttgtggtgcacgccctgatgggagacgatccggagccacctgtgcagctttttgagcctcctacgcttcaggaactgtatgatttagaggtagagggatcggaggattctaatgaggaagctgtgaatggcttttttaccgattctatgcttttagctgctaatgaaggattagaattagatccgcctttggacactttcgatactccaggggtgattgtggaaagcggtacagctgtaagaaaattacctgatttgggttccgtggactgtgatttgcactgctatgaagacgggtttcctttgagtgatgaggaggaccatgaaaaggagcagtctatgcagactgcagcgggtgagggagtgaaggctgccattggttttcagttggattgcccggagcttcctggacatggctgtaagtcttgtgaatttcacaggaaaaatactggagtaaaggaactgttatgttcgctttgttatatgagagcgcactgccactttatttacagtaagtgtgtttaagttaaaatttaaaggaatatgctgtttttcacatgtatattgagtgggaaatttgtgcttcttattataggtcctgtgtctgatgctgatgagtcaccatctcctgattctactacctcacctcctgagattcaagcacctgttcctgtggacgtgcacaagcccattcctgtaaagcttaagcctggaaaacgtccagcagtggaaaaactcgaggacttgttacagggtggggacggacctttggacttgagtacacggaaacggccaagacaataagtgttccatatccgtgtttacttaaggtgacgtcaatatttgtgtgagagtgcaatgtaataaaaatatgttaactgtgtactggtttttattgctttttgggcggggactcaggtatataagtagaagcagacctgtgtggttagctcatagaagctggctttgattcatggaggtttgggccattttggaagaccttagaaagactaggcaactgttagagaacgcttcggacggagtctccggtttttggagattctggttcgctagtgaattagctagggtagtttttaggataaaacaggactataaagaagaatttgaaaagttgttggtagattgtccaggactttttgaagctcttaatttgggccatcaagttcactttaaagaaaaagttttatcagttttagacttttcgaccccaggtagaactgccgctgctgtggcttttcttacttttatattagataaatggatcccgcagactcatttcagcaggggatacgttttggatttcgtagccacagcattgtggagaacatggaaggttcgcaagatgaggacaatcttaggttactggccagtgcagcctttgggtgtagcgggaatcctgaggcatccaccggtcatgccagcggttctggaggaggaacagcaagaggacaacccgagagccggcctggaccctccagtggaggaggcggagtagctgacttgtctcctgaactgcaacgggtgcttactggatctacgtccactggacgggataggggcgttaaaagggagagggcatctagtggtactgatgctagatctgagttggctttaagtttaatgagtcgcagacgtcctgaaaccatttggtggcatgaggtccagaaagagggaagggatgaagtttctgtattgcaggagaaatattcactggaacaggtgaaaacatgttggttggagcctgaggatgattgggaggtggccattaaaaattatgccaagatagctttgaggcctgataaacagtataagattactagacggattaatatccggaatgcttgttacatatctggaaatggggctgaggtggtaatagatactccagacaagacagttattagatgctgcatgatggatatgtggcctggagtagtcggtatggaagcagtaacttttgtaaatgttaagtttaggggagatggttataatggaatagtgtttatggccaataccaaacttatattgcatggttgtagcttttttggttttaacaatacctgtgtagatgcctggggacaggttagtgtacggggatgtagtttctatgcgtgttggattgccacagctggcagaaccaagagtcaattgtctctgaagaaatgcatattccaaagatgtaacctgggcattcttaatgaaggcgaagcaagggtccgccactgcgcttctacagatactggatgttttattttaattaagggcaatgccagcgtaaagcataacatgatttgcggtgcttccgatgagaggccttatcaaatgctcacttgtgccggagggcattgtaacatgctggctactgtgcatattgtttctcatcaacgcaaaaaatggcctgtttttgatcacaatgtgttgaccaagtgtaccatgcatgcaggtgggcgtagaggaatgtttatgccttaccagtgtaacatgaatcatgtaaaagtgttgttggaaccagatgccttttccagaatgagtctaacaggaatgtttgacatgaacatgcaaatctggaagatcctgaggtatgatgatacaagatcgagggtgcgcgcatgcgaatgcggaggcaagcatgccaggttccagccggtgtgtgtagatgtgactgaagatctgagaccggatcatttggttattgcccgcactggagcagagttcggatccagtggagaagaaactgactaaggtgagtattgggaaaactttggggtgggattttcagatggacagattgagtaaaaatttgtttttctgtcttgcagctgtcatgagtggaaacgcttcttttaatgggggagtcttcagcccttatctgacagggcgtctcccatcctgggcaggagttcgtcagaatgttatgggatctactgtggatggaagacccgtccaacccgccaattcttcaacgctgacctatgctactttaagttcttcacctttggacgcagctgcagccgccgctgccgcctctgttgccgctaacactgtgcttggaatgggttactatggaagcatcctggctaattccacttcctctaataacccttctaccctgactcaggacaagttacttgtccttttggcccagctggaggctttgacccaacgtctgggtgaactttctcagcaggtggccgagttgcgagtacaaactgagtctgctgtcggcacggcaaagtctaaataaaaaaaaaaaattccagaatcaatgaataaa

SEQ ID NO: 159 - DNA, 19427 bp, Human adenovirus
  misc_feature 1..19427: note = Human adenovirus 14, Ad14 E2
  source 1..19427: mol_type = genomic DNA
atggccagccgcgaaggaaatcagttaagcgaccgccacagggagcacacccccgaacgcggaaggggttctgccagtcatccgccttccaggtcggaccgcagcccttcgcaatcgcctccacctctgcccccgaagagaaacacctgtcgccgtgtggggtcaggttcttctaccgacagtcagttggtaatggtgagcgaaacttcacaatcctccctgtctccggaacggagcgacagtcctcctcccccgataccccccaaaaagaagccaaggaagaccaaacatgttcccatgcaagacatcagtcaagacagcgaagaagaaagagaagaggcgcagcttgtagcagtaggtttcagctacccgcccgtgcgcatcgttgagaaggatggcaaaagaagcattgaaaagattgccaaagatgatcctctggctaaaggagctgctgcctgtactgttaagaatccgattagcttgcccctggtgtctgcttgggagaagggcatggaagtgatgtgtgtactgatggagaagtacaggctggataacgaacttagaacctcttttaaactaatgcctgagcagcacgaacaatacaagcgcatctgtcaccagtacgtaaacgaggagcaccgaggcatccagttaactttcactagtcacaagacactgagcacgatgatgggaagatttctgcagggaatgatacattctttttctcagatcgcccaccataattgggaatgtacaggctgtgcgttgtggcctcatggctgcaatgattatgagggcaagctgaagtgcctgcatggcactattatgattcagaaggagcagattatcgagatggatgtggccagcgagaatggacaacgagccttgaaggagaatcccgagcgaaccaaaatcacccaaaaccgctggggcagaagtgtggtgcaaatagccaacaatgacgcccgctgctgtgtgaatgatgccggctgcgcagctaaccagttttcgagcaggtcctgcgggatgttctataccgagggtagtaaagcccagcaggctttcaagcaatatgatgctttcatgagagccgtgtatccaggaatcagacaggatcaggccaagatgatactaatccccctgcactgcgattgcaaccacaagcctaattgggtgcccgccatgggtaggcagacctgcaagatgaccccgttcagcattgccaatgctgaagatctggatgtgggcatgattgcagatcccaccgtgctggcaagcgtgagacatccgtcgctgatggtgtttcagtgctgcaatccggtgtaccgcaactctcgcgctcagagcactggtcctaattgtgatttcaagatttcggctcctgacctgctgggagctttgcagctgaccagaaagctgtggagtgacatcctacccgatataccggttcccaagttggtgattcccgaattcaagtggcaacccaagtatcagttccgcaacgtatcactgcccgcgggtcattctgattctcgtcagaacccattcgacttgtaaataaataagtaatccagagccttgatacgtgtaaaaaataaagtgctgtttattcaacacgttgtttacatgagtcattattgcacatccatacggtcgaacgcagtggccctttcgatgtgtgtacgatgggagcgaaaataaggcgaatgggtattgagaaaatggtagagtgctttttgattgtcacacagggtgggctggactttaggagaatgaagcatgttgtttggcactccagtcagcaatttcatggtggggtttccgtccatgggacggtcaggccagtgcacaaaggcatgaaggaacatgcagcagaaaagtccgcaggcggcagaacgggggccctgcacggtctgggtagatttttccagcgtaatacagcggtccttggtagcaagagcgctgcggcgcaggagaccctcatattcaaactggtaaatctgtttaagacgatcatccgagaatccaaaaggatcaaaaaggtagcaggtgttagaacgtgggttccaaccgaaagccaaccagtgctctccccccgtctcacgtccggccgtgtttacaatggcacaggcgagcttatcgggggccatgaaccccgggaagcgcttatcgtaggttcccaaaaaatagggtccgcaacccaggtcttggacaatggctctgagctcttgctcgctggagccgttttgggatccgcaggccatggttgcagctgctgtttgcaagaagcaagaagctttttacgtggtagcgttaccggccgagaacggtgtacgcaggtagactgtctcgatgatgccgcgatgtggctgatgcactctgaccacgtcgaaaacttcgaagagaagataaagcagggtgggctcatccatgggatccacctcaaaggtcatgtccagagcatgagctgagttggcataaagcatgttctgtcccaagtctgtaagggcccccatagacatgaagttgctcgagaacggtatgcgccacatggttctgtcacacaagaactttttctgcgtaacactatttacggcagttgttccaatgagtggatagggatagttagcgggatagggttgaccttggcgcatggtcggagccatgtaacccacaaagccagagttgttgtgttggtagggtatggcgacggccttgaagtctttgtaattgacctcatcaaccacctgcctgctcatgggctggaagtttctgaaaaatgaatacatgcgatctttgtatccttctggaatgtagaagccctgatagcctatgttgtagttggcgagcatctgtaccaagaaccagtctttggtcatgttgcattgggctacattgtagccttcgccatccacagtgcgctttatttcaaattcgttgggagatagtaacctgtcatttccaggccagctcactgaagagtcaaacatgatggaaaccttcttaaaagtgtggttcaggtagaaggtaccatccaggtagggaatagaaccagaatagacaaagtaggggtcaaatccagaccccaaagagggagtttctttggttttgagtctggtaaatgaccagcctctgaaagccgcccagttgcgagaaggaatggaaatgggaatattggttgcattggcaggaatgggatagagcatgttagctgcagatagatagtcgttgaatgactgatcattggtgtcattccgcagcatggcttcaagggtggaagcggtgttgtgagccatggggaaaaaggtagcatagaggttgatgctcgtgaaactgatgctggcgccatctacccgtaggtcgttaccgagggaactctgtagcaccatgttcacatccttcctgaagttccactcataagtgtaggagcctgggagaagcagcaggtttttgacagcgaagaatttttgaggcacttgtatgtggaaaggcacataacgtccgttacccaaaagcatggatcggtaacgcaagccagcgttacggtggtggttgaatgggttgacattgtccatagcatccagagaccacctggcgccaatgttcacataggtgtctactagagatggcggcaccacccgcccgttcatgtagtcgtaggtgtttttgttttctggaagagtgacattggacggggtgtatttgtacgagtctgggagatacagagccacattggaataaaggaaacttcgccatagattggcttgaaggttaatttccatggcaaatggatttcccttaacaagttcactgataccatttggatttacatctttccaagcttggtctccatttaactgaatctccttgtaactatctgttcgcggaccgatgccgtccagtggaaaacagtagttgggaagttcatcttccacaccatgattttcaataacacgcacatcgggatcataactgtcaacagcctgattccacatgctaaagtatctggttctatcgcccagggagtcaagcaagagttggtaagacagttctgtgtttctgtcctgcaagtcaaccactgcattcaactgagatgcttggccagccagcacccccatgttaccagtactgttatagtacataagaccaataaaattatctctgaagccaatgtagttgggtctgttgggcatagactgctgtccaagattagcatttgaactagcatctgaaacttcaggtttgtacacaacatgagtatctggagattccaggtccacattttctgcatacattacaatcttaggtttaagaccttgtttttgtgatcttaagtcaaaaaagttcatgtcaatgtcatattcaatgttgttgccttcttctgttttcacttttgcctgtccgcctttcacattagtaggtttagcaaaagacccatagcacggtttcattttagtgtccggtttaagtactctgcctccgtatttttcttcagtgccatctgtatcagtccacgattcctgtcccacctggggttctggttggtaaagcttattagcgtagataggtttagggtcaccttcagctgggacttccaaacctattggtagtccgtcttttgtaatgtcagcatcggcttttactggggcattgccaaaagtgtatgtagctttttcgtcattttccccgtcttcattttgccgttcttcagtagtttcaacccctttatccaaccactgagatgcatttggagcgcctttaggagccagagagttgtaagccgtaccagaatagggtttgaaactgggacctctgtccaacacgcccctaatgtcaaagaacgtgctggccatatccagcactctgttgtcgcccacggccagggtgtaccgcactttgtaagagtatgtattgtcctcccggtcaacgggcacgaagcgcaacatgagccgctggctacggtcggtggtcacatcgtgggttggcgctacggtgggatttctaaacttatttcccagattgaagtaggtgtctgtggcgcgggcgaactgcaccagacccggactcaggtactccgaagcatcctgtccggcgatgtgcatgtatgcccactggggcagcatcgatggggtggccatcttgaaagtaactcagcgtcgacgcacgacctcttccttttttcctctgctgctgtgacggcgtgtaatgacacatatacacagataggcaagttaagcgctactccatatttaattaaaagcagcgacggcgttttacactttgcacgcctagacccacgatgctgttcagagtattttgccagtgcgcatttggacgaggagcgcccccgggacgtgacctggctacggcgactggtttcggggcagcgacaggcttagaagcgggtacagcagtagcagcagggggagggggcaaatccaaagtgacgggtcgatgcaactgagaaggtttcattaccccggtagccataggggctatcggtctagtggtgggcattccaagcttcgttgcttcctcataagaaggcggttcatctacgcgcgtcaccagcgtctcttccaaatcgggacgcggacgcttgtcgcctcgtttttctggcggaggaatttcttcctccacttgtatttcacctggggttgctggcggcgggtccaaacgactgtttatctttttctgcacagcctgattagccaaatctaccactccattgatgccggaagctatcccatcgactactttttgttgaaagttctggtctttaagtttatttctaagcgcctgtcctgtactgctgttccaagctttgttcccgtatgtttttatggttgagccaaaatttttaagcccgctccagatactgctccaattgaaggcgcccccgttcagttggctcgtgccgatgtcgctccaggtgcccatgtacggcttcgtgccgtgtcgcggagccaaggatgaaaaattgatgttttccatctctaagaaaacatagtcacaggaccaggagtgtcagagtccattgtatttttttttttatttatacttttttttccaatgtcaatgtcgttgcgaggcctgaaccgccacggaagctatgcctggtatcgcgccaattgcagcagcgataattggaattaaggctggcaaaaaaccaccccgcaattgcttgcggatagcacgccgtcgcctgtagcgtcgcattccgcgccccaacatccctcttctacggcgcgaatttcttcctcggtaaccagtgatgggaacgcgaaggcgacaagtgagggccatatctgcaaggaggcagcggcaacattgattaagtgatgatacttggatggtaacgcgcacgcggcagtgtcaaaggttccgcactactattgcggtacacttgccgcaccagggcgccgggagtcggtttgcttgtgcgtctacggcgacgactgcgatttgcaggtgtcttgcggcgacggcgggaggtactgtttcggctgcgatagtagcgagtgcctcggtaaccaggagtaggaataatagatgggtgtacaacatagttgggcatcaacagacttgctggaccgtactttcgtcgggatcttcgagtgggaccggcggcgtcagttgtaataggcatcggcatccatggatccgtttgcacttcagtggaggtggcagtaggctttgcgggttcagtttgcacttccatactttcagtgggaatcttaatgtctacagtttgtactcccagaccaggcgctacctgcttaatgggtctcactttaacctcaggttgaatatctggatccacttttactttctccaaaacgtcctccaacttttggcgtttgggtaccattagttgcatagtgggatacaaatcttcaccttcgcgtttaacacctgttcgcggagttacgggtaacacttgctgcaaagtgaccggtttaagactaggggtgggatttccatgatccaagggtatggacactgtctcatccttgggatttattctactacgcttgccataagcaaactcgcctaatcggtcagccgcctgctcaagaatatcatcatccccgtacacctcatcataggaacgcttaaaagtagcgcttgaacgctcgccgggtgtaaagaccaccgaagttccaggtctcaacaaatgtcgaactttgcgtccacgccattgcacgcgtcgccgtggggcaaactcgcgcacaaactccgccagcccatcatcgccatcttcctcttcttttttgtcctttttagcccgcttgattttgcggggttttttttcatccttcagcggttggccgtagacttcaggtgcgataacctgcagcatttcttccttgtatttgcgcttggacatcctcgccgctgggacacaacatcggagactgctcagtatcttctaagtgcgagggggacgggtgcgcacgggtacacgttgaccggtggcagcgtcacgcacccagtatacattgcctcttcgcgtttgggccatgtcggcaatagtcgccgctgcgacagcggctgcttgcctgcgggacctgccggcgctggcgcccgaagctgcacgtctggccgccctaagcatggctcttcgtcccacgcgtctagctcttcgtagcagagctcttgcggctcgcatggcagtggtagctcggtggcgtctggcaatgcgccttcgccggctcttacgtcgagcatagttgcgagcgtcagccactacactgtcaataactgcatccacagtagatgtaggcgcagtaggagtataattacgggcgtcggcaaccacctcatcgattacatcatcgacggtggttcgaacgcgagtgcggcccttgagggcaccccatggagcgcgaaaatgaccgcgaacacgcacgggatgttgggtagaacgtttgcgtgcgcctccgtacatcttgcttggagcgcgcagaccccaaccggtgttattactgggcgagataagaatggacatttttttagaaagtgcggcttgaaaggacgcgcggtgcgactatgcccagtgccttgtacacgtagggacaggtgcggcgtctggcgtcagtaacggtcacacgttggactccccggatactgctgcgcaacggcagggtcccgtgatctgtgagagcaggaacgttttcactgacggtggtaatggtgggcgccggcggacggattaaaatctggttctcaggaaagcggttgaagacgtgcgtaagcgaggtggactggcggagctgctgggagtacacagcttgttcgttgtagaagctctttgagaagacgggcataagctctgcacccaccacagggtagttgctgacttgtctagtggagcggaaagtgacaggatcctgcatcatgtctggaagcgaccagtagacctgctctgctccgcaggtgacatctgaggtggtgagcaatgtccaggaacgcactcctttttcgggatcgccataattgtacgaaaggtaccaactgcgataggctgtgttgattttatcttccaacacattatagcttctattcttactatctttttctacaggttgaatagtgagtttcacgtccgttcctccagttacatcggccaataatgattctgcagtcggaacaggtgttggtgcaaaattgtctcctctgacctctccagcgttagcaacccttgtaaagtcgctggcaactatgtttgccttagcttccgcagcagcttctattttggctttttgttctttcttactgttctcataggcatctacatccaagagggccggaatattacctccttctaaatcttcatacaaaatcttaaaaccctcttgaaatggctgtttttttctgataccaagaaggttgctcaaacgactttcggtaaagtccactccacagccaggcagtaagacaatgtcaggatgaaaggcttcatacgtatacactccaggcataatcaacttggtttcgggatcccatcccagcttgaagttcctggtgtcgaacttaacaccaatgtcactttcaagcactccattctgtctgcccactttcaagtagttatctatgatggcattgttcatcaaatcaatggtcatagtaactgaaaagttgccttctggcaaagtaaactcgaaccactcatattccaaaatatcctgcttgtgatcatatgtatccccaactgcagcaccttcgggaggttttctggacaccatcacacgcgctttgaagttgttactaaacatatactcgtttacgttgggcatgttagtatgcatgatggtctttagctgaccgccccaccgcgatcgttcatcaaagttaatggtctgggtactggcttccgtaggggtaaagtcattgttctgcaccaccgtggtcaagaagttgctgtggtcattctgatagttcagagaagcaatgtccgccgacttgttgtccaccagatacaacctggtggtatcgtactgaggtgccagttccgagtaacgaatgctgtttctgccctccgtaggtgccaggtatcgcggaggtacaaagggagcctccagtggggattgcatcaccgccgtcgcctgctgctgctgcatcacgctctcgtacgaaggaggaggaccctccggatacaccaccgctccgcctagcacgactcgcctcattatactagacacaaataataaagaagaacgaacgtacgctcgtcgccatggccttggtgagttttcctttttattttttttttacaacataccacccaagcgagggcgcaaatgagcaaacgggttgccccttcctctcccacccaagtccaacacgctgctatcatcggccgaatcctcatcttcccacacaagacccctctgtctgtcatgacgctggcgtctacggctcgctctacttgtagtccccatgatcccaggctcgtctctgtgatcctgagcataagtcttccatctactcatcttatccaccaaactttctattccattgtttgggaaatttttttctctcgccggtctgagcaaggaatcgtttaggtattcctcttcgcccattaaactcgggcgacttattctacccacttcgctgctacgtacactgtgtagagaaaagggtagactaggaaaaggacttgcagactcgggctcagccgcggtagcacccatgaccccggacagcgatgcagaagaatgcattctatcgccgccttcctttttccacgtgcgatgatcaaaaagaggtgaaaaaacattactgtccacgtcgtcccacagaaacccgtcattagggtcgggcatgtcatattcgcccgtgtagaaaccaggtgggggcagccagtgcgggtttaggatggcattggtaaaataatcagagttcatagcggcagctctgtgcaagtagtccagcagtttgttaatgaaaggccggttactggcatacatgctgggctccatatttcgcgctgtcatgtccaatgccgcagtcggagttgccccctcttgcatcagaaacaatcccacgctctgctgcacatatctaaggatcctctcctcctccgcagtaagagcatattgaggagggatcttctgagaccgattggtaagcaagaagttcagagtggcttccaaactgccagtgtcttcctgacccaaagcgcgactgacttgggtaatttcttgataggtctgctcgtccacctggctttgccctatggcttcgcgatacaggtttagtaggtaacccaaataggaattacggtcgatgctgccgctgtcggtgaaaggagctaccaacagtagtaataggcgggagtttggagttaacaagctagacacggttgctctttctcctaccggggcatgcactccccacaaacctttaaggtttttaaaagcttggctcagatttaccgtctgcaaaccctgtctgctagtctgaaagaagtagtcaggtccggactgatacacttcgctctgaggtacttcagataccatcagtctcaacgcactcaaaaagttagtataatcctgttgaccacgcggcacattagcaggctgagtactcaaaaaagcatttaacgccaccagcgaaccaaggttggcatcgcgctggaacctttcacgctgagacacggcttcgcgtacatctgttatcatacggtccaaattggtttgcacattgctactgttgtagcgagccacgcgttctaaaagagcgttgtataccagtccggcctcatctggacgaatagctttgttctccaccaacgcgtttacaatggccaggaccttctcatgagtgggattagagcgggaaggcactacagcttccatgatggccgatagacggttggcctggggttgctgtctaaaggcttcggggttgcgagtcgtcaacgccatgatacgttgcatggcctgggtccaatcgtccgaggagttaatgccggacggctggctctgcagcgccgcccgcgttgcgggatccggtgcttgctgttccatctagcaaaaaacacgggttgtgccatcagtcttccaagtactcgccctcttcctcctcgccttcatccgcctcttctatgtaaggaagctcacatcctgccgtcgcggcgctcagagccctgcgactaggctgccactgcaagtcagctcccatgtcaaagtaattctcaccctctgttccagctccagtcagagctctttgcaaactgtgcatcagttccctgtcgcttaactcgcgcctcctactggcgctaacggcgcgatgcattctgtcattgcggtacaccccaagatcatcgctcagggtcaagaccttgagcgtcatacgcatgtagaacccatctatcttcacctccttgtctatgggaacgtatggagtcttgtagatcttgcgagcgtaatattttcccaaacttaaaaccgagtaattgatggcagccaccttttcggccaggcccaggctccgctcctgcactatgatactctgtagaatgttgataagatcatacaaccatctcccctcgggttcagtgatgttgagcagtgcctctctgaaagcctcgttgtctctgctgtgttgcaccaccagaaacagctgtgcggtcagaggtttgctagtagggttctgaatgatagcttccatcaaatcccacaaatgcatcaaaccaagagtaacttcttcgcgggcaatcagggttcgcacatgattattaaaagacttttggaagttacgctcttcctttactgtctgctcgtaagccgatacaaggttggctgcagccacgtgtgccctggcaggactgatccctgtcacttcatcaacttcgaaatcctcgtcccgcaacactcgtcttcggtccaaaccgtgacgcagctcacgacccgcgttaaagcgggaagctcgcatctcctccggctcctcgccgcttctgtctctaaataggttctgttggggcacatacgcctcgcgagaatcttttttcagttgaactcgcggatgccgctcgggcgagggcgcacctagacgtgccagtccttcgccctcttccaagtccagatcataggcgggctgtcccgcaccgctcacggcggcagttgcagtagttgcagggacagccttttgtggttgctgctgctgcgaggggggctgttgttggggacgcatctgtcgcagcacgggatgcatctgagcggcaaaaaaaaaaataggactcacttccctgccattcagcaaccagcaaaacgactcgattccgtatcctggatttttgtaggctgggtcgagacgggagtgccaataccacgttagccgcggctccggccggctcgagtacaagtcttgaaccggggtacaccgcgacccaacccgttcacgttcctccaggctacagagtcgagtcgctgaacgctttcattttcttcgtgtctatagagcatcaatgactgcgcgcgcctcactggtcaaaccgtgcctacaatgaactacttcatgccgctacgcaacatttggaaccgcgtacgcgagtttcctcgggcttccactaccgccgcaggaatcacctggatgtccaggtacatctacggctatcaccgccttatgttggaagacctcgcccccggcgctccagctacagaacaatggcctctctaccgccaaccaccaccgcattttcttatagggtaccagtatctggtgcgcacctgcaacgattacatttttgacacccgcgcctattcgcgccttaaatacaccgagctcgtgcgccatggtcaccaaacagttaactggtcagtcatggccaactgtgcttacaccatcaataccggggcttaccaccgcttcgtggattttgatgactttcaagccaccctcacccaagtacagcaagccatcctcgccgaaagagttgtagctgacttggcactggtccaaccaatgcgcgggtttggactcacacgtatgcatggcagaacgggtgaagaagaagtgcccgtagaacggctcatgcaagactactacaaagatctggctagatgtcaggataatgcttggggaatggccaatcgcctgcgtatccagcaagccggacccaaagacctggtgctcctcgccaccatccgccgtcttagaactgcctactttaatttcatcaccagcagcatcgtctcaccttcccgagatgaagaaggaatagaagacccagaccgaacacataaccacccccgcccacaagaagccgtactcagcctaccttgtgactgtgactggttagacgctttcgttgaaaggttttcagatcccgtggatcttgacacgattagatctctgcgcgcagtccctacgggccaattaataaaatgtataatcagcgccctttccctcccaaacggagaacctcccagtcaccactttaaggagatgcgcggcggtgtttttactctgcgaccgcgcgagaacggccgcgccgtcactgaaaccatgcgccgccgccgcggagaggtcattgaacgattcatcgaccgtttgcccgtgcgccgtcgacgtcgccgcgtgccccctccgcccccgcctgaagacgaagaagagatgttagtggaagaagagatagaagaggaagaagagatgccgggagccttcgaacgcgaagtacgggccaccatagccgaactcatccgtcttctcgaggaggaattgaccgtgtccgcgcgaaactcccagttttttaattttgccgtggacttctacgaggccatggagcgcttggaagctctgggcgatgtcagcgaaatgccgctgagacgatggatcatgtatttctttgtcgccgaacacatcgccaccacactcaactacctttttcagcgcctatgcaactatgcggtcttcaccagacacgtggagcttaacctcgctcaggtggtgatgcgcgcaagagactccgagggggccgtggtttacagccgcgtctggaacgaggcgggcatgaatgcattctcccaactcatgggccgtatctccaatgacctcgcggccaccgtcgagagagcgggtcgcggagatcttcaggaggaagaaatcgagcagttcatggcggagatcgcctaccaggacaactctggtgacgtacaagaaatactgagacaagctgccgttaacgataccgaaattgattctgttgaactctctttcaggttcaagctcacggggccggtagctttcacccaaagacgtcagatacaagacgtcaatcgacgcgtggtggcgcacgcaagtcttctcagagcgcagtaccagaacctgcccgtgcgcggcgccgacgtgccactaccagccatgcccccgggtccggaacaaccgctgccgcccggcgcgcgtccccgtcaccgcttttaagcatgcaagaagcaagagagccaccaccgatcaaaagaaaaaacaaaggtacggtagtggcacccaaaggacacggaaccctgcaagccattgacgtctctacaaacgaacctgtggaaatcaagtaccatctaaacctcccgcacgccctggaaaagatcatgcaagttaatcttctgtccctacctactaacctgagtccgcagcgtctcaggactctggacagctccagcctgcgcgctctcgtccttcagctccgcccctcccgcgccgaggtctggacttgcctcccgcgggggctcgtcagcatgaccaccatcgaaacagaagatgaacaggccaatacagcgaatatagaagagcacgagatacaatcgccaggcctcggcttcccactgaaatttctcgtcaagggaagccaggtacagctcattcacgagatacaacccgtgcaacgctgcgactactgcggccgtctgtacaagcacaaacacgaatgctcggcgcgccgcagaaacttctacttccatcacatcaacagccaatcctccaactggtggcaggaaatccagtttttcccaatcggctctcatcctcgcacagaaagactcttcctgacctacgatgtggaaacttacacctggatggggtcctttggcaaacaactagttcctttcatgctggtcatgaaactctcaggagaagagcgtctcgtcaacatggcccacgatctagccattaaacttaagtgggatcgatggcaacaagatcccggaaccttctactgtgtcactccagaaaaaatggcaattggccagcattttcgtcagtatcgggaccagttacaaacagcactggcggtggatctttggtcatcattcctacatgcaaatcctcatctgcacgaatgggcccttgaacactacgccttatctgaccctacagacctaacctttgatgagctcaataagctacctcacgtcagaggcacgccgcgtttcatagaattatacattgtaggacacaacatcaacggcttcgacgagatcgtcctagctgcccaggtgatcaacaatcgagcggaagtaccacagccttttcgcatcactcgcaattttatgcccagagccggtaagattctcttcaacgatgttactttcgctttgcccaaccccgcctacaagaaacgggtagacttccaactctgggaacagggagcctgtgacgacatggactttaaataccaatttgtcaaagtcatggttagagacaccttcgcccttactcacgcttcgctacgaaaagctgctcaagcatactctctacccgtagagaagggctgctgcccttacaaggcagttaatcagttctacatgctaggatcttaccgtgcagacaaagacgggtttccgctagaagagtactggaaggatcgcgaagaataccttctcaaccgcgaactgtgggaaaagaaaaaccaaccaggttatgacatcattcaagaaacacttgactactgcgccctggacgtacttgtcaccgcccaactggtaaccaagcttgaagaatcttatgcccactttatcagagactctgtaggtctacctcatgcccacttcaacatttttcaaagacccaccatctcttccaattctcacgccatctttcgccagattgtctacagaacagaaaaacccaatcgcaccaacttgggtccggggctgctagcgccgtcacatgaactatatgactatgtgcgagcaagtatcagaggggggcgatgctatccaacctacataggcatctttgaggatcccatctacgtctatgacatctgtggcatgtatgcctctgcactcacccatcccatgccctggggcagtccccttaacccatatgagcgcgcactggcagctcgagaatggcaaatggccttagatgaccccactcccatcagctattttgataaggatttacttcctggaatctttaccatggatgcagaccctcccgatgaacttatgctagacccacttccacctttctgttctaggaaaggaggtaggctctgctggaccaacgaaccccttcgaggcgaggtggccaccagtgtggatttaattaccttgcataaccgagggtggcaagtgagaattgtgccagatgaattgacaactatcttccccgaatggaagtgcctggcacgcgaatatgtccaactcaacatcgctgccaaagagcgcgcggacaaggaaaagaaccaaaccatgcgatccattgccaaacttttatccaacgccctgtatggatcatttgccaccaaacttgacaataaaaaaattgtgttttctgaccaaatggacgaaaacctcatgaaaggcatctcaagcggcactgtcaatatcaaatcctcctcgttcttagaaactgacaacctgagtgcagaggtcatgcccgccttcgagagggaatacctaccccaacagctgacgttcctggacagcgatccggaagacagtgaggaagagcagagaaccgcccccttttatacccccccagctgggaccccaggtcacgtgaaatacacctacaagccaatcacattcctggatgttgaagagagtgacatgtgtttgcatactttggaaaaggtggaccccctggttgacaacgatcgctacccctcccacatagcctcctttgtgctggcctggacgcgcgcctttgtatcagagtggtcagagttcctatacgaagaagaccgaggcactccactggaaaagaggcctgtaaaatcagtctacggggacacggacagcctgtttgtcactcaacgaggacacgaactcatggagaccaaaggtaagaaacgcatcaaaaaatatggcggaaaacttgtttttgaccccaatgaaccggatttaacctggctggtggaatgtgaaactgtttgcgcctcctgcggcgcggatgcatactccccagaatccattttccttgcgcccaagctgtatgcgctgaaatgcctatactgcccggtatgcaagaaaacttccaaaggtaagctccgcgccaagggccacgcagccgaggcgctcaactacgaactcatggtaaactgctacttggccgacatacagggcgccaagcggcacaagttttcgaccagcaggatgagtctgaagcgcaccctggcaagcgcccaagcaggcgcacaccccttcactgtgacggaaacaaccctgacccgaactttgagaccctggaaggaccgaaccctggcagcgctggacgcccatcgtctcataccctactccaggagccgtccaaacccgcgaaacgaggaggtctgctggatcgagatgccatagaacacatcactgaactgtggaacagactagaacttttgcaacagactctctccaaaatgcccatggctgacggtctaaaaccgctgaaaaacttttcctcactacaagaacttctatcactaggaggagagcgcctcctaatggatttggtgcgggaaaatatgcatgtaagggaaatgatgaacgaggtggcccccttgcttcgagaagacggcagttgccgttccctaaactaccaactgcaacctgtaatcggaatcatttatggccccaccggatgtggcaaatctcaattgctcagaaacttgctatcatcccaactaattaccccagccccagaaacggtgttctttatagccccccaggtggacatgattccaccctcggaactgaaagcttgggaaatgcaaatctgtgaggggaactatgctccggggcccgaaggaacattcataccccaatcgggtactctccgtcccaaatttattaaaatggcctatgatgatttaactcaggaacataactatgatgtgtcagacccacggaacgtgtttgcccgcgctgctgcccacggccctattgctattatcatggatgagtgcatggaaaatctcggaggacacaagggtgtctccaaatttttccacgcttttccatccaagctgcacgataaatttcctaaatgtaccggatacaccgtcttggtggtacttcataacatgaacccaagacgagatcttggcggcaatattgccaacttaaaaatccaatccaaaatgcacataatttcaccccgaatgcacccctcccagctcaaccggtttgtaaacacctacaccaagggcttatctgtggcaatcagcctacttctaaaagatattgtgcaacaccatgcacagcgaccttgttatgactgggtaatttacaacactaccccggagcatgaatcccttcaatggagctatctccaccccaaagacggcctaatgcccatgtatctaaacattcaatcccacctttataggattttggaaaaaatccaccgtgttctcaatgatcgagatcggtggtctagggcataccgtgcgcgaaaaatgaaataaaaaacacttgattttaaatcaa

SEQ ID NO: 160 - DNA, 3748 bp, Human adenovirus
  misc_feature 1..3748: note = Human adenovirus 14, Ad14 E3
  source 1..3748: mol_type = genomic DNA
tataaaacgcctgatgattagaggccgaggtattcagcttaacgacgagtcggtgagctctccgcttggtctacgaccagacggaatctttcaaattgccggctgcgggagatcttccttcacccctcgtcagactgttttgactttggaaagttcgtcttcgcaaccccgctcgggcggaatcgggaccgttcaatttgtggaggagtttactccctctgtctacttcaaccctttctccggatctcctgggcactacccggacgagttcataccgaactttgacgcaattagcgagtcagtggacggctacgattgatgtctggtgacgcggctgagctatctcggctgcgacatctagaccactgccgccgctttcgctgttttgcccgggaactcattgagttcatttacttcgaactccccaaggatcaccctcaaggtccggcccacggagtgcggattactatcgaaggtaaaataaactctcgcctgcatcgaattttctcccagcggcccgtgctgatcgagcgagaccagggaaacaccacggtttctatctactgcatttgtaatcacccaggattgcatgaaagcctttgctgtcttatgtgtactgagtttaataaaaactgaattaagactctcctacggactgccgcttcttcaacccggattttacaaccagaagaacgaaacttttcctctcatccaggactctgttaactttacctttcctacttacaaaccagaagctcaacgacaacaccgcttttccagaagcattttccctactaatactactttcaaaaccggaggtgagctccacagtctccccgcagaaaacccttgggtggaagcgggccttgtagtgctaggaattcttgcgggcgggcttgtgattattctttgctacctatacacaccttgcttcactttcctagtggtgttgtggtattggtttaaaaaatggggcccatactagtcttgcttgttttactttcgcttttgggaccgggttctgccaactacaatccatgtctagactttgacccagaaaactgcacacttacttttgcacccgacacaagccgcatctgtggagttcttattaagtgcggatgggaatgcaggtccgttgaaattacacacaataacaaaacctggaacaataccttatccaccacatgggagccaggagttcccgagtggtacactgtctctgtccgaggtcctgacggttccatccgcattagtaacaacacttttattttttctacaatgtgcgatctggccatgttcatgagcaaacagtattctctatggcctcccagcaaggacaacattgtaacgttctccattgcttattgcttgtgcgcttgccttcttactgctttactgtgcgtatgcatacacctgcttgtaaccactcgtatcaaaaacgccaataacaaagaaaaaatgccttaacctctttctgtttacagacatggcttttcttacagctctcatacttgtcagcattgtcactgccgctcacggacaaacagtcgtctctatccctctaggtcataattacactctcataggacccccaatcacttcagaggtcatctggaccaaactgggaagcgttgattactttgatataatctgtaacaaaacaaaaccaataatagtaacctgcaacatacaaaatcttacattaattaatgttagcaaagtttacagcggttactattatggttatgacagatacagtagtcaatatagaaattacttggttcgtgttacccagtccaaaaccacgaaaatgccaaatatggcagaaattcgatccgatgacaattctctagaaacttttacatcttccaccacacctgacgaaaaaaatatcccagattcaatgattgcaattatcgcagcggtggcagtggtgatggcactaacagtaatatgcatgcttttatatgcttgtcgctacaaaaagtttcatcctaaaaaacaagatctcctactaaggcttaacatttaatttctttttacacagccatggtttccactaccacattccttatgcttactagtatagcaactctgacttctgctcgctcacacctcactgtaactataggctcaaactgcacactaaaaggacctcaaggtggtcatgtcttttggtggagaatatatgacaatggatggtttacaaaaccatgtgaccaacctggtagatttttctgcaacggcagagacctaaccattatcaacgtgacagcaaatgacaaaggcttctattatggaaccgactataaaagtagtttagattataacattattgtactgccatccaccactccagcgccccgcaaaactactttctctagcagcagtgccgctaacaatacaatttccaatccaacctttaccgcgcttttaaaacgcactgtgaataattctacaacaatttccacttcaacaatcagcatcatcgctgccgtgacaattggaatatctattcttgtttttaccataacctactacacctgctgctataaaaaagacgaacataaaggtgatccattacttagatttgatatttaatttgttctttttttttttatttacagtatggtgaacaccaatcatggtacctagaaatttcttcttcaccatactcatctgtgcttttaatgtttgcgctactttcacagcagtagccacagcaagcccagactgtataggagcatttgcttcctatgcactttttgcttttgtcacttgcatctgcgtatgtagcatagtctgcctggttattaattttttccaacttctagactggatccttgtgcgaattgcctacctgcgccaccatcccgaataccgcaaccaaaatatcgcggcacttcttagacttatctaaaaccatgcaggctatactaccaatatttttgcttctattgcttccctacgctgtctcaaccccagctacctatagtactccaccagaacaccttagaaaatgcaaattccaacaaccgtggtcatttcttgcttgctatcgagaaaaatctgaaattcccccaactttaataatgattgctggaataattaatgtaatctgttgcaccataatttcatttctgatataccccctatttgattttggctggaatgctcccaatgcacatgattattcccaagacccagaggaacacattcccctacataacatgcaacaaccaatagcgctaatagaatacgaaagtgaaccacaacccccactactccctgctattagttacttcaacctaaccggcggagatgactgaaacactcaccacctccaattccgccgaggatctgcttgatatggacggccgcgtctcagaacagcgactcgcccaactacgcatccgccagcagcaggaacgcgtggccaaagagctcagagatgtcatccaaattcaccaatgcaaaaaaggcatattctgtttggtaaaacaagccaaaatatcctacgagatcaccgctaccgaccatcgcctctcttacgagcttggcccccaacgacaaaaatttacctgcatggtgggaatcaaccccatagttatcacccaacaaagtggagatactaagggttgcattcactgctcctgcgattccatcgagtgcacctacaccctgctgaagaccctatgcggactaagagacctgctacccatgaattaaaaaaatgattaataaa

SEQ ID NO: 161 - DNA, 978 bp, Human adenovirus
  misc_feature 1..978: note = Human adenovirus 14, Ad14 fiber
  source 1..978: mol_type = genomic DNA
atgaccaagagagtccggctcagtgactccttcaaccctgtctacccctatgaagatgaaagcacctcccaacacccctttataaacccagggtttatttccccaaatggcttcacccaaagcccagacggagttcttactttaaaatgtttaaccccgctaacaaccacaggcgggtctctacagctaaaagtgggagggggacttacagtagatgacactgatgggaccttacaagaaaacataggtgccaccacaccacttgttaagactgggcactctataggtttatccctaggagccggattgggaacagatgaaaataaactttgtaccaaattgggagaaggacttacattcaattcaaacaacatttgcattgatgacaatattaacaccctgtggacaggagttaaccccaccgaagccaactgtcaaatgatggactccagtgaatctaatgattgcaaattaattctaacactagttaaaactggagccctagtcactgcatttgtttatgttataggagtatctaacaattttaatatgctaactacatacagaaatataaattttactgcggagctgttttttgattctgcgggtaatttactaactagcctgtcatccctaaaaactccacttaatcataaatcaggacaaaacatggctactggtgccattactaatgctaaaagtttcatgcccagcacaactgcttatcctttcaataataattctagagaaaaagaaaactacatttacggaacttgtcactacacagctagtgatcacactgcttttcccattgacatatctgtcatgcttaaccaaagagcaataagagctgatacatcatattgtattcgtataacttggtcctggaacacaggagatgccccagaggggcaaacctctgctacaaccctagttacctccccatttaccttttactacatcagagaagacgactga

SEQ ID NO: 162 - DNA, 126 bp, Human adenovirus
  misc_feature 1..126: note = Human adenovirus 14, Ad14 fiber tail
  source 1..126: mol_type = genomic DNA
atgaccaagagagtccggctcagtgactccttcaaccctgtctacccctatgaagatgaaagcacctcccaacacccctttataaacccagggtttatttccccaaatggcttcacccaaagccca

SEQ ID NO: 163 - DNA, 273 bp, Human adenovirus
  misc_feature 1..273: note = Human adenovirus 14, Ad14 fiber shaft
  source 1..273: mol_type = genomic DNA
gacggagttcttactttaaaatgtttaaccccgctaacaaccacaggcgggtctctacagctaaaagtgggagggggacttacagtagatgacactgatgggaccttacaagaaaacataggtgccaccacaccacttgttaagactgggcactctataggtttatccctaggagccggattgggaacagatgaaaataaactttgtaccaaattgggagaaggacttacattcaattcaaacaacatttgcattgatgacaatattaacacc

SEQ ID NO: 164 - DNA, 576 bp, Human adenovirus
  misc_feature 1..576: note = Human adenovirus 14, Ad14 fiber knob
  source 1..576: mol_type = genomic DNA
ctgtggacaggagttaaccccaccgaagccaactgtcaaatgatggactccagtgaatctaatgattgcaaattaattctaacactagttaaaactggagccctagtcactgcatttgtttatgttataggagtatctaacaattttaatatgctaactacatacagaaatataaattttactgcggagctgttttttgattctgcgggtaatttactaactagcctgtcatccctaaaaactccacttaatcataaatcaggacaaaacatggctactggtgccattactaatgctaaaagtttcatgcccagcacaactgcttatcctttcaataataattctagagaaaaagaaaactacatttacggaacttgtcactacacagctagtgatcacactgcttttcccattgacatatctgtcatgcttaaccaaagagcaataagagctgatacatcatattgtattcgtataacttggtcctggaacacaggagatgccccagaggggcaaacctctgctacaaccctagttacctccccatttaccttttactacatcagagaagacgac

SEQ ID NO: 165 - DNA, 1677 bp, Human adenovirus
  misc_feature 1..1677: note = Human adenovirus 14, Ad14 penton
  source 1..1677: mol_type = genomic DNA
atgaggcgagtcgtgctaggcggagcggtggtgtatccggagggtcctcctccttcgtacgagagcgtgatgcagcagcagcaggcgacggcggtgatgcaatccccactggaggctccctttgtacctccgcgatacctggcacctacggagggcagaaacagcattcgttactcggaactggcacctcagtacgataccaccaggttgtatctggtggacaacaagtcggcggacattgcttctctgaactatcagaatgaccacagcaacttcttgaccacggtggtgcagaacaatgactttacccctacggaagccagtacccagaccattaactttgatgaacgatcgcggtggggcggtcagctaaagaccatcatgcatactaacatgcccaacgtaaacgagtatatgtttagtaacaacttcaaagcgcgtgtgatggtgtccagaaaacctcccgaaggtgctgcagttggggatacatatgatcacaagcaggatattttggaatatgagtggttcgagtttactttgccagaaggcaacttttcagttactatgaccattgatttgatgaacaatgccatcatagataactacttgaaagtgggcagacagaatggagtgcttgaaagtgacattggtgttaagttcgacaccaggaacttcaagctgggatgggatcccgaaaccaagttgattatgcctggagtgtatacgtatgaagcctttcatcctgacattgtcttactgcctggctgtggagtggactttaccgaaagtcgtttgagcaaccttcttggtatcagaaaaaaacagccatttcaagagggttttaagattttgtatgaagatttagaaggaggtaatattccggccctcttggatgtagatgcctatgagaacagtaagaaagaacaaaaagccaaaatagaagctgctgcggaagctaaggcaaacatagttgccagcgactttacaagggttgctaacgctggagaggtcagaggagacaattttgcaccaacacctgttccgactgcagaatcattattggccgatgtaactggaggaacggacgtgaaactcactattcaacctgtagaaaaagatagtaagaatagaagctataatgtgttggaagataaaatcaacacagcctatcgcagttggtacctttcgtacaattatggcgatcccgaaaaaggagtgcgttcctggacattgctcaccacctcagatgtcacctgcggagcagagcaggtctactggtcgcttccagacatgatgcaggatcctgtcactttccgctccactagacaagtcagcaactaccctgtggtgggtgcagagcttatgcccgtcttctcaaagagcttctacaacgaacaagctgtgtactcccagcagctccgccagtccacctcgcttacgcacgtcttcaaccgctttcctgagaaccagattttaatccgtccgccggcgcccaccattaccaccgtcagtgaaaacgttcctgctctcacagatcacgggaccctgccgttgcgcagcagtatccggggagtccaacgtgtgaccgttactgacgccagacgccgcacctgtccctacgtgtacaaggcactgggcatagtcgcaccgcgcgtcctttcaagccgcactttctaa

SEQ ID NO: 166 - DNA, 2838 bp, Human adenovirus
  misc_feature 1..2838: note = Human adenovirus 14, Ad14 hexon
  source 1..2838: mol_type = genomic DNA
atggccaccccatcgatgctgccccagtgggcatacatgcacatcgccggacaggatgcttcggagtacctgagtccgggtctggtgcagttcgcccgcgccacagacacctacttcaatctgggaaataagtttagaaatcccaccgtagcgccaacccacgatgtgaccaccgaccgtagccagcggctcatgttgcgcttcgtgcccgttgaccgggaggacaatacatactcttacaaagtgcggtacaccctggccgtgggcgacaacagagtgctggatatggccagcacgttctttgacattaggggcgtgttggacagaggtcccagtttcaaaccctattctggtacggcttacaactctctggctcctaaaggcgctccaaatgcatctcagtggttggataaaggggttgaaactactgaagaacggcaaaatgaagacggggaaaatgacgaaaaagctacatacacttttggcaatgccccagtaaaagccgatgctgacattacaaaagacggactaccaataggtttggaagtcccagctgaaggtgaccctaaacctatctacgctaataagctttaccaaccagaaccccaggtgggacaggaatcgtggactgatacagatggcactgaagaaaaatacggaggcagagtacttaaaccggacactaaaatgaaaccgtgctatgggtcttttgctaaacctactaatgtgaaaggcggacaggcaaaagtgaaaacagaagaaggcaacaacattgaatatgacattgacatgaacttttttgacttaagatcacaaaaacaaggtcttaaacctaagattgtaatgtatgcagaaaatgtggacctggaatctccagatactcatgttgtgtacaaacctgaagtttcagatgctagttcaaatgctaatcttggacagcagtctatgcccaacagacccaactacattggcttcagagataattttattggtcttatgtactataacagtactggtaacatgggggtgctggctggccaagcatctcagttgaatgcagtggttgacttgcaggacagaaacacagaactgtcttaccaactcttgcttgactccctgggcgatagaaccagatactttagcatgtggaatcaggctgttgacagttatgatcccgatgtgcgtgttattgaaaatcatggtgtggaagatgaacttcccaactactgttttccactggacggcatcggtccgcgaacagatagttacaaggagattcagttaaatggagaccaagcttggaaagatgtaaatccaaatggtatcagtgaacttgttaagggaaatccatttgccatggaaattaaccttcaagccaatctatggcgaagtttcctttattccaatgtggctctgtatctcccagactcgtacaaatacaccccgtccaatgtcactcttccagaaaacaaaaacacctacgactacatgaacgggcgggtggtgccgccatctctagtagacacctatgtgaacattggcgccaggtggtctctggatgctatggacaatgtcaacccattcaaccaccaccgtaacgctggcttgcgttaccgatccatgcttttgggtaacggacgttatgtgcctttccacatacaagtgcctcaaaaattcttcgctgtcaaaaacctgctgcttctcccaggctcctacacttatgagtggaacttcaggaaggatgtgaacatggtgctacagagttccctcggtaacgacctacgggtagatggcgccagcatcagtttcacgagcatcaacctctatgctacctttttccccatggctcacaacaccgcttccacccttgaagccatgctgcggaatgacaccaatgatcagtcattcaacgactatctatctgcagctaacatgctctatcccattcctgccaatgcaaccaatattcccatttccattccttctcgcaactgggcggctttcagaggctggtcatttaccagactcaaaaccaaagaaactccctctttggggtctggatttgacccctactttgtctattctggttctattccctacctggatggtaccttctacctgaaccacacttttaagaaggtttccatcatgtttgactcttcagtgagctggcctggaaatgacaggttactatctcccaacgaatttgaaataaagcgcactgtggatggcgaaggctacaatgtagcccaatgcaacatgaccaaagactggttcttggtacagatgctcgccaactacaacataggctatcagggcttctacattccagaaggatacaaagatcgcatgtattcatttttcagaaacttccagcccatgagcaggcaggtggttgatgaggtcaattacaaagacttcaaggccgtcgccataccctaccaacacaacaactctggctttgtgggttacatggctccgaccatgcgccaaggtcaaccctatcccgctaactatccctatccactcattggaacaactgccgtaaatagtgttacgcagaaaaagttcttgtgtgacagaaccatgtggcgcataccgttctcgagcaacttcatgtctatgggggcccttacagacttgggacagaacatgctttatgccaactcagctcatgctctggacatgacctttgaggtggatcccatggatgagcccaccctgctttatcttctcttcgaagttttcgacgtggtcagagtgcatcagccacatcgcggcatcatcgagacagtctacctgcgtacaccgttctcggccggtaacgctaccacgtaa

SEQ ID NO: 167 - protein, 325 aa, Human adenovirus; identical to SEQ ID NO: 70
  REGION 1..325: note = misc_feature - Human adenovirus 14, Ad14 fiber

SEQ ID NO: 168 - protein, 91 aa, Human adenovirus
  REGION 1..91: note = misc_feature - Human adenovirus 14, Ad14 fiber shaft
DGVLTLKCLTPLTTTGGSLQLKVGGGLTVDDTDGTLQENIGATTPLVKTGHSIGLSLGAGLGTDENKLCTKLGEGLTFNSNNICIDDNINT

SEQ ID NO: 169 - protein, 192 aa, Human adenovirus
  REGION 1..192: note = misc_feature - Human adenovirus 14, Ad14 fiber knob
LWTGVNPTEANCQMMDSSESNDCKLILTLVKTGALVTAFVYVIGVSNNFNMLTTYRNINFTAELFFDSAGNLLTSLSSLKTPLNHKSGQNMATGAITNAKSFMPSTTAYPFNNNSREKENYIYGTCHYTASDHTAFPIDISVMLNQRAIRADTSYCIRITWSWNTGDAPEGQTSATTLVTSPFTFYYIREDD

SEQ ID NO: 170 - protein, 558 aa, Human adenovirus; identical to SEQ ID NO: 71
  REGION 1..558: note = misc_feature - Human adenovirus 14, Ad14 penton

SEQ ID NO: 171 - protein, 945 aa, Human adenovirus; identical to SEQ ID NO: 72
  REGION 1..945: note = misc_feature - Human adenovirus 14, Ad14 hexon

SEQ ID NO: 172 - protein, 42 aa, Human adenovirus; identical to SEQ ID NO: 136
  REGION 1..42: note = misc_feature - Human adenovirus 14, Ad14 fiber tail

SEQ ID NO: 173 - DNA, 114 bp, Human adenovirus
  misc_feature 1..114: note = Human adenovirus 16, Ad16 5? (left) ITR
  source 1..114: mol_type = genomic DNA
cattatctataatataccttatagatggaatggtgccaacatgtaaatgaggtaatttaaaaaagtgcgcgctgtgtggtgattggctgcggggtgaacggctaaaaggggcgg

SEQ ID NO: 174 - DNA, 114 bp, Human adenovirus
  misc_feature 1..114: note = Human adenovirus 16, Ad16 3? (right) ITR
  source 1..114: mol_type = genomic DNA
ccgccccttttagccgttcaccccgcagccaatcaccacacagcgcgcacttttttaaattacctcatttacatgttggcaccattccatctataaggtatattattgataatg

SEQ ID NO: 175 - DNA, 365 bp, Human adenovirus
  misc_feature 1..365: note = Human adenovirus 16, Ad16 Packaging Sequence
  source 1..365: mol_type = genomic DNA
gcaatgctgggatgtgacgtaacttatgtgggaggagttatgttgcaagttatcgcggtaaaggtgacgtaaaacgaggtgtggtttggacacggaagtagacagttttcccacgtttactgacaggatatgaggtagttttgggcggatgcaagtgaaaattctccattttcgcgcgaaaactgaatgaggaagtgaatttctgagtcatttcgcggttatgacagggtggagtatttgccgagggccgagtagactttgaccgtttacgtggaggtttcgattaccgtgtttttcacctaaatttccgcgtacggtgtcaaagtcctgtgtttttacgtaggtgtcagctgatcactagggta

SEQ ID NO: 176 - DNA, 3431 bp, Human adenovirus
  misc_feature 1..3431: note = Human adenovirus 16, Ad16 E1
  source 1..3431: mol_type = genomic DNA
tttaaacctgtcgagttccgtcaagaggccactcttgagtgccagcgagaagagttttctcctccgcgctgcgagtcagttttgcgctttgaaaatgagacacctgcgattcctgccacaggagattatctccagcgagaccgggatcgaaatactggagtttgtggtaaataccctgatgggagatgacccggaaccgccagtgcagcctttcgatccacctacgctgcacgatctgtatgatttagaggtagacgggcctgatgatcccaatgaggaagctgtaaatgggttttttactgattctatgctgctagctgccgatgaaggattggacataaaccctcctcctgagacccttgataccccaggggtggttgtggaaagcggcagaggtgggaaaaaattgcctgatctgggagcagctgaaatggacttgcgttgttatgaagagggttttcctccgagtgatgatgaagacggggaaactgaacagtccatccataccgcagtgaatgagggagtaaaagctgccagcgatgtttttaagttggactgtccggagctgcctggacatggctgtaagtcttgtgaatttcacaggaataacactggaatgaaagaactattgtgctcgctttgctatatgagaatgcactgccactttatttacagtaagtgtatttaagtgaaatttaaaggaatagtgtagctgtttaataactgttgaatggtagatttatgtttttgcttgcgattttttgtaggtcctgtgtctgatgatgagtcaccttctcctgattcaactacctcacctcctgaaattcaggcgcccgtacctgcaaacgtatgcaagcccattcctgtgaagcctaagtctgggaaacgccctgctgtggataagcttgaggacttgttggagggtggggatggacctttggaccttagtacccggaaactgccaaggcaatgagtgccctgcagctgtgtttatttagtgacgtcatgtaataaaattatgtcagctgctgagtgttttattgcttcttgggtggggacttggatatataagtaggagcagatctgtgtggttagctcatagcaacctgctgccatccatggaggtttgggctatcttggaagacctgagacagactaggctactgctagaaaacgcctcggacggagtctctggcttttggagattctggttcggtggcgatctagctaggctagtgtttaggataaaacaggactatagggaagaatttgaaaagttattggacgacagtccaggactttttgaagctcttaacttgggccatcaggctcattttaaggagaaggttttatcagttttagatttttctactcctggtagaactgctgctgctgtagcttttcttacttttatattggataaatggatccgccaaacccacttcagcaagggatacgttttggatttcatagcagcagctttgtggagaacatggaaggctcgcaggatgaggacaatcttagattactggccagtgcagcctctgggagtagcagggatactgagacacccaccggccatgccagcggttctggaggaggagcagcaggaggacaatccgagagccggcctggaccctccggtggaggagtagctgacttgtttcctgaactgcgacgggtgcttactaggtctacgtccagtggacaggacaggggcattaagagggaaaggaatcctagtgggaataattcaagaaccgagttggctttaagtttaatgagccgtaggcgtcctgaaactgtttggtggcatgaggttcagagcgaaggcagggatgaagtttcaatattgcaggagaaatattcactagaacaacttaagacctgttggttggaacctgaggatgattgggaggtggccattaggaattatgctaagatatctctgaggcctgataaacagtatagaattactaagaagattaatattagaaatgcatgctacatatcagggaatggggcagaggttataatagatacacaagataaagcagcttttagatgttgtatgatgggtatgtggccaggggttgtcggcatggaagcagtaacatttatgaatattaggtttaaaggggatgggtataatggcattgtatttatggctaacactaagctgattctacatggttgtagcttttttgggtttaataatacttgtgtagaagcttgggggcaagttagtgtgaggggttgtagtttttatgcatgctggattgcaacatcaggtagggtcaagagtcagttgtctgtgaagaaatgcatgtttgagagatgtaatcttggcatactgaatgaaggtgaagcaagggtccgccactgcgcagctacagaaactggctgcttcattctaataaagggaaatgccagtgtgaagcataatatgatctgtggacattcgaatgagaggccttatcagatgctgacctgcgctggtggacattgcaatattctggctaccgtgcatatcgtttcccatgcacgcaagaaatggcctgtatttgaacataatgtgattaccaagtgcaccatgcacataggtggtcgcaggggaatgtttatgccttaccagtgtaacatgaatcatgtgaaggtgatgttggaaccagatgccttttccagagtaagcttaacaggaatctttgatatgaatattcaactatggaagatcctgagatatgatgacactaaaccgagggtgcgcgcatgcgaatgcggaggcaagcatgctagattccagccggtgtgcgtggatgtgactgaagacctgagacccgatcatttggtgcttgcctgcactggagcggagttcggttctagtggtgaagaaactgactaaagtgagtagtgggacgagctgtggaggtgggactttgaggttggtaaggtgggcagattgggtaaattttgttaatttctgtcttgcagctgccatgagtggaagcgcttcttttgaggggggagtatttagcccttatctgacgggcaggctcccaccatgggcaggagttcgtcagaatgtcatgggatccactgtggatgggagacccgtccagcccgccaattcctcaacgctgacctatgccactttgagttcgtcaccattggatgcagctgcagccgccgccgctactgctgccgccaacaccatccttggaatgggctattacggaagcatcgttgccaattccagttcctctaataacccttcaaccctggctgaggacaagctacttgttctcttggctcagctcgaggccttaacccaacgcttaggcgaactgtctaagcaggtggcccagttgcgtgagcaaactcagtctgctgttgccacagcaaagtctaaataaagatcttaaatcaataaa

SEQ ID NO: 177 - DNA, 19627 bp, Human adenovirus
  misc_feature 1..19627: note = Human adenovirus 16, Ad16 E2
  source 1..19627: mol_type = genomic DNA
atggccagccgcggaggaaatcagtcaagcgaccgccaacgggagcacacccccgaacgcggaatgggctctgccagccatccgcctccaaggccagaccgcagcccatctcagtcgcctccacctctgcccccgaagaggaacacctaccgtcgcgtggggtccgattcttctatcgagagccaggtggtactggtaagcgaaacttcgcggtcatccctgtctccggaacggagcaacagtcctcccccgatccctcccaagaagaagcccaggaagaccaagcatgtccctctgcaagacatcagccaggacagcgaagaagaaagagaacaggctcagttggtggccgtgggcttcagctaccccccggtgcgcatcattgagaaggatggcaagagaagtgttgagaagatcgacaagaatgaccctatagctaaaggagctacttctattgctgttaggaatcctttgagcttgcccctggtatctgcctgggagaagggcatggaagtgatggctgtgctaatggagaggtataggctggataatgacctgagaacctctttcaagctgatgccagagcagcacgagcagtacaagcgtatctgccaccagtatgtgaacgaggagcaccgtggcattccgctgacatttagtagcatgaagaccctgacagcgatgatgggaagattcatgcagggattggtgcattcttattctgagatcgcccacaataattgggagtgcaccgggtgcgctctgtgggctcatggatgcaccgattacgaaggcaaggtgaaatgcctgcatggcactatcatgatccagaaggaccacattatcgagatggatgtggcgagcgagaacgggcagcgcgctatgaaggagaacccagacagagccaagatcacccagaaccgctggggcagaaatgtggttcagttggccaacaacgatgcccgctgctgtgtaaatgatgccaactgtgctactaaccaattttccagcaagtcctgtggaatgttctacaccgagggaagtaaggctcaggaagctttcaagcagtacgaagccttcatgaaggccgtatatccagggataacccccgaccaagccaggatgatgctgattcccattcattgcgattgcaaccacaagccaggctgcgctcccgtgatgggcaggcagacctgtaagatgaccccctttgggatggccaatgctgaagacttggatgtgactaccatcagtgacccgaccgtgctggcaagcgtgagacacccagccttgatggtgttccagtgttgcaacccagtgtaccgcaactcccgtgtccagaatgccggccccaactgtgatttcaagatctctgctcctgacctgcttggcgccctgcaactgaccagaaagttgtggcaagacacctttcccgagattccagttcccaagctggtgatccccgagttcaagtggcagaacaggttacagttccgcaacgtatccctgcccgcgggccactatgactcccgccagaacccatttgatttctgagtgaatgatgaaaacgaatgagcaaaaaaccagagccttagtgcatgtaaaaataaagtgctttttattgaacacggttttacatgacttattgcatatccatacggtcaaacgcggtggccctttcgatgcgtgcgcggtgagaacgaaagtaagatgagtgggtgtttaggaagcggtatagtgcctcctggttgcggcgcagggtgggctggacttggggagattggagcatgctgttgggcaccccagtcagcaacttcatggtggggtttccgttcatgggacggtcgggccagtgcacaaaggcatgaaggaacatacagcaaaaaagtccacaggcggctgagcgtgggccctgcacgctctgggtggacttttccagggtgatgcagcggtctttggtagcaagggcactgcggcgcaggagcccctcgtactcaaactggtaaatctgtttgagtcgctcatccgagaacccaaaaggatcaaaaaggtagcaggtgttggagcgcgggttccaaccaaaagccagccagtgctctccccccgtctcgcgtccggcagtgttgactatggcgcaggcgagcttgtcgggggccatgaaccccgggaaacgcttgtcaaaggttcccaggaaatagggaccgcaacccaggtctcggacgatggctttgagctcttgctcgctggagccgtttccggacccgcatgacatggctgcagctgctgcttgcaagaagcaagaggcttcttatgtggtggcgttgccggccgagaacggtgtgcgcaggtagacggcctcgatgacgccgcggtgtggctggtgcactctgaccacgtcgaagacttcgaaaagaagataaagcagggtgggctcatccatgggatccacctcaaaagtcatgtccagtgcatgggccgagttggcatagagcaggttttgtcccaggtctgtaagggcccccatggacatgaagttgctggagaacggtatgcgccacatggtcctgtcgcacaggaactttttttgggtaacactcttaacggcagtagttccgatgagcgggtatggataattggctgggtaaggttccccttgtctcatagtaggcgcaaggtatcctacaaagccagagttgttgtgttgatatggtaaggtgacggctttgtagtcagtgtaattaacctcatcaaccacctgcctgctcataggctggaagtttctgaaaaaggagtacatgcgatccttgtatccctcagggatgtaaaagccctggtagccaatgttgtagttggcgagcatctgtaccaagaaccagtctttggtcatgttgcattgggctacgttgtagccttcgccatccacagtgcgctttatttcaaattcgttaggagatagtaacctgtcatttccaggccagctcactgaagagtcaaacatgatggaaaccttcttaaaagtgtgatttagatagaaggtaccatccaggtagggaatagaaccggaatagacaaagtatgggtcaaatccagaccccaaagagggagtttctttggttttcagtctggtaaatgaccagcctctgaaagccgcccagttgcgagaaggaatggaaatgggaatattggttgcgttggcaggtatggggtagagcatgttagctgcagataggtagtcgttgaatgactgatcattggtgtcattccgcagcatggcttcaagggtggaagcggtgttgtgagccatggggaaaaaagtagcataaagattgatgctcgtgaaactgatgctggcgccatctacccgtaggtcgttaccaagggaactctgtagaaccatgtttacatccttcctaaagttccactcataagtgtaggagcctgggagaagcagcaggtttttaacagcgaagaatttttgaggcacttgtatgtggaaaggcacataacgtccgttacccagaagcatggatcggtaacgcaagccagcgttacggtggtggttgaatgggttgacattgtccatggcatccagagaccacctggcaccaatgttcacataggtgtctactagagatggcggcaccacccgcccgttcatgtagtcgtaggtgtttttgttttctgggagagtgacattggacggggtgtatttatacgagtctgggagatacaaagccacattggaataaaggaaacttcgccatagattggcttggatgttgatttccatggcaaaaggattgcctccatggatttcattagcagtactaactgtggtgtcatctttgtcccactgtgttccactggttccagcaactgcatctgttttaactttaacaccttggtaagtgtctgtaaatcccacaccattcaacggaaagcaatagtttggcaattcgtcctccacaccatggttttcaataatacgcacatcaggatcatagctgtccaccgcctgattccacatactgaaataccgggttctgtcacccagagagtcaagcaagagctggtaggacagttcagtgtttctgtcttgcaagtcaaccacagcattcagctgagaggcctgaccggccagcacccccatattgccagtgctgttgtagtacatgagcccaataaaattgtctctgaagccaatgtagttgggtctgttaggcatggcttgctgacccaaattggattcagagctggtgtcctctgttccaggtttgtatacaatatgagtatctggagtctgcaagtcaacattttctgtgtacattacaatatctggatcgtagttagcagcaatatttttgttgtcaaagaaagccagatctatatcatagttaggagtggtggcggcggtttctgaatcttttaagttagcctgaccaccttctttgttggtaggcttggcgaaagaaccatagcagggtttcatctttgtagtgtccttcagagctctgcctccatatttttcctctgtaccattggcgtcaacccaactggcatttccaacttgtggttctggttggaaagttttatcagcataaattactgtgtcagttccagaagttgaatctattccaataggcagcccatcagcttctatctttttcccagtaacaccgggcatggcagctaccccaaaggtatgcattttgctgtcagaatccttccactggcaggtgttgggcgctcccttgggagccaggctgttgtaggcggtcccggagtagggtttgaagctagggccccggtccagcacgccgcggatgtcaaagaacgtgctggccatatccagtactctgttgtcccctacagccagcgtgtagcgaactttgtaagagtaggtattgtcttcccggtcaacgggcacgaagcgcagcattagtcgctggctacggtcggtggtcacatcgtgggtgggcgccactgtggggtttctaaacttgttccccatactgaagtaggtgtctgttgcacgggcgaactgcaccagacccggactcaggtactccgaagcatcctgtccggcgatgtgcatgtatgcccattggggcatcatcgatggggtggccatcttgaaagcaactcagcctcggcgcgcgacctcttcctttctcctctgctgcggcggcatggtgatgatacatacacacagacaagcaagttaagcgctactccatatttaattaatagcagcgacggcgctttacactctgcacgcccagacccacgatgctgttcagagtactctgccagtttgctttcgggcgcggtgtgccccaggacgcggtctggctacggcgacgggctgtacggcggtgggctttctggtagcgacaggtttgggaataggcgccgcagaagcagggggaggaggcaagtccaaggtggcaggccgatgcgactgagaaggtttcatcaccccggtagccatgtgagctacaggcctggtagtgggcattccgagctttactgcctcctcgtatgaagggggctcgtctgcgcgcgtcaccaacgtctgttccagctcgggacgcggtcgcttgtcgccccgcttctccagcggaggaagctcttcctccacttccatttcaccaggagttgcgggcggcgggtccaggcggctgtttatctgtttctgcacagcctggttggctagatccactacgccgttaataccagaggcgataccatcgaccaccttttgttggaagttctgctccttaagcttatttctaagggcctgccctgtgctgctgttccaagctttgttcccataggtttttatggtcgagccaaaatttttaagcccgctccagatactgctccaattgaaggcgcccccgttcagttggctcgtgccgatgtcgctccaggtgcccatgtacggcctcgtgccgtgtcgcggagccagggatgaaaaattgatgtcttccatctctacaaaaacatagtcacaggaccaggagcgtcagagtccattctattttttatttataaatttttccattgttagtggcgctgcgaggcctgaaccgccacggaagctatgcctggtatcgccccgatcgccgcggcgatgatgggtataagagctggcagaaagccaccccctaatcgcttgctgatagcgcgccttcgtctgtggcggcgcatccctcgccccaacatccttctacggcgcgagtttcttcctcggtagccagtaatggggacgcgaaggcggcaagtgagagccatatctgcaaggaggcagcgtcaacagtcattaagtggtgatgcttggatgatagcgcgcgcgcggcagcgtcagaggttcagcgcgaccatcgcggtacactctccgcaccagggcggcgggagttaatttgctggcagtggtgcggcggcggcgacggcgagtgcgacttgcaggtagtttgcggcggcgtgaggtgttgctccgacttcgatagtagcgagtgcctctgtaacccggagtgggaatgatggatgggtgcagagcatagttgggcattagcagacttgctgggccatactttcgacgtgatcttctagtggtgctgggggcggcaacgggcgcgggcatccagggttccgtctgaacctcaattgaggtgactgtgggttttgcaggttcggtctgcacttccatggactcagtgggaatcttgatgtcaaaggtttgtactcccaaacctggcgccacttccttgatgggtctcactttcacctcaggctggatatcggcatccactttcattttctccagtacgtcttctaatctctgccgcttgggcaccattagctgcatggtgggatataggtcctcaccctcgcgctttacgcctctgctcgcaggtacgggcagcacttgctgcagggtgactggtttgaggctaggggtgggatttccatgatccaagggaatagataccgcctcctctttgggactggatcttgtgcgcttgccataagcaaactcgccaaggcggtctgccgcctgctcaataatatcgtcatccccatacacctcatcataggaccgtttaaaagtagtgctggaacgctcgccaggtgtaaagaccacagtggtcccgggtctaagcacttggcgtacttttcgaccgcgccactgcacgcgccgtcttggcgcgaactcgcgcacaaactccaccagtccatcatcgccatcttcttcttttttgtcctttttaacccgcttgattttgcggggctttttttcatccttcatcggcggaccgtagatttcaggcgcgatgacctggagcatctcttccttgtatttgcgcttggacatacttgccgctgggacacaacatcggagactgctcagtatcttctaagtgcgaggggggcgggtgcgcacgggcacgcgctggccggtagtggcatcgcgcacccaatacacattgcctcttcgcggttgggccatgttggcaatggccgctgctgccgccgtggccgcgcgcctgcgggacctgccgctgctagcaccagaagccgcgcgtctggccgctctaagcatggctcttcgtcccacacgtttggccctccgcagaatagcttttgcagctcgcatagcgggagtagccctgtggcgcctggcgatgcgcctccttcggctcttccggcgagcataggcgcgagcgtctgccactacactgtcaataactgcatccacagtagatgtaggcgcagtaggagtataattacgagcatcggcaaccacctggtcgatcacatcatcgaccgtggtccgagtgcgggtacggcccttgagggcgccccagggagcgcggaaatgaccgcgaacgcgcacggggtgctgggtagagcgtttgcgggcgcctccgtacatcttggtgggcgcatgcagtccccaaccggtattattactgggcgagatgagaatggacatttttttttttttttagaaagtgcggcttgaaagaacgcgcggcgcgactatgcccagggccttgtaaacgtagggacaggtgcgacgtctggcgtcagtaacggtcacgcgctggactccccggatactgctgcgtaacggcagggtcccgtgatctgtgagagcaggaacgttttcactgatggtggtaattgtgggcgccggcgggcggatgaggatctggttctcagggaagcggttgaagacgtgcgtgagcgaggtggactgtcggagctgctgagagtacacggcttgctcattgtagaaactctttgagaagaccggcataagctctgcacccactactgggtagttgttgacttgtctcgaggagcggaaggtgatggggtcttgcatcatgtcggggagcgaccagtagacctgctcggctccacaggtgacatccgaagtggtgagcagtgtccaggaccttattcctttctcagggttaccataattgtaggacaggtaccagctgcggtaggctgtgttgattttgtcttccaagacattgtagcttctattcttgctgtctttttctaaaggttggatctttaactcttttttaacttcagacataagtaatagttctgcagctgcagcttcacgtttttgtttttcagttatataagtatctcctctagttatattatcatcttcactggtttcctctgcaacagccactgtggttgttttaaccaccgccttttcgcctgtttcagtagtggtatcctttttgctttcctcataggcagtgacatccaaaagggcaggaatattacccccttcaagatcttcatacatgattttgaaaccctcctggaatggatgtctcttcctgatgccaagcaagttgctaagtcggctttcagtaaaatctaccccgcaaccaggcaacaaaacaatgtcaggatggaatgcctcataagtgtagacccctggcataatcaacttagtttcggggtcccacccgagcctgaagtttctagtgtcaaacttaacaccaatgtcactttccagcactccattctgtctgccaattttcaggtagttgtcaatgatggcattgttcatcaggtcgatggtcatggtagctgagaagttaccttctggtaaagtgaactcaaaccactcatatttcaaaatatcatctttatgatcatttactgtaacaccttcaggagccttcctagataccatcaccctcgccttaaacttgttgctgaacatgtactcgttcacgttgggcatgttggtgtgcataatggtcttcagctgaccgccccaccgcgaccgctcgtcaaagttaatggtctgggtgctagcctccgtgggggtaaagtcattgttctgcaccactgtggtcaggaagttgctgtggtcgttctgatagttcagggaggcgatgtccgccgacttgttgtccaccagatacaacttggtggtatcgtactggggtgacagctccgagtaacgaatgctatttctcccttccgtaggcgccaggtaccgagggggtacgaagggagcctccagtgggggctgtatcatcgccgcctgttgctgcatcacgctctcgtaagaaggaggaggaccctccggatacaccaccgctccgcctagcacggctcgtctcctcatcgtactagatacagataacaaaaaaaagaacgaacgcacgctcggttgccatggccttggtgagttgcctttttatttttactttcacttttacaacatgcgaccgaaacggggacgcagatgagcgaacgggttgccaactccttttccacccaagtccaacacgctgctgtcatcggcagagtcctcgtcgtcccacacaagacccatctgcctgtcgtggcgctggcgtctacggctcggtctgcttgtagcccccaagatcctgggctcgtctctgtgatcctgcgcataggtcttccatctactcatcttatccaccaggctctctattccattgttagggaagttcttttccctctctggcctcagcaaagagtcattcaagtactcatcctcgcccatcaagcgcgggcggtttattctccccagttcactgctgcgaacgctgtttagtgaaaaggacaagctagggaaaggactcgcagcttcgggcacggccgcggcagcaccagccgttccgggcaacgatacggaagagtgccttctatcgcccccttccttcttccaaaccgtataacctggcggcggggaaaatatgctactgtccacatcgtcccataggaacccgtcattgggatcgggcatgtcgtattcgccagtgtagaaaccaggtgggggcagccagtgtgggttcagaatagcattggtgaaataatcagagttcatggcggccgccctgtgcaggtagtccagcagtttgttaatgaaaggcctgttactagcatacatgctgggctccatgtttcgagctgtcatatccagcgcggcggtaggtgtcgccccctcctgcatcaaaaacagtccaacgctctgttgcacgtatcttaggatccgctcctcctcagcggtaagcgcatactgaggagggatcttctgcgaccggttggttagtaagaagttcagggtggcttccaaaccgcctgtgtcttcctgacccagggcgcggctcacttgggtgatttcttgataggtctgctcgtccacctggctctgtcctatagcctcgcgatacaggttaagcaggtagcccaagtaggagttgcggtcgatgctaccgctgtcagtgaagggggataccagcagcagcagcaggcgggagttgggagtcagcaagctagacacggtcgcgcgatctcctactggggcgtgcactccccacagacccttcaggttcttgaaagcctgggtcaggttcactgtctgcaagccctgtctgctggtctggaagaagtaatctggcccggactggtacacctcgctctggggcacctcagataccatgagtctcaatgcactcaaaaagtttgtatagtcttgctgaccacggggcacgttggcgggctgggtgctaaggaaagcgtttagcgctaccaatgaccccaagttggcgtcgcgctggaaccgctcgcgctgagacacagcctcgcgcacatcggtcaccatccggtccaggttggtctgcacgttgctgctgttgtaacgggccacgcgctccaaaagagcattgtataccagcccggcctcatcgggacggatggccttgttctccaccagcgcgttcacgatagccaggaccttctcgtgggtggggttggagcgggagggcactacggcctccagtatggccgaaaggcggttggcctggggttgctgtctaaaggcttcggggttgcgggtcgtcagcgccattatacgttgcatggcctgggtccaatcgtccgaggagttaatgccggacggctggctctgtagcgccgcccgcattgcggggtccggtgcctgctgttgttccatctagcaaaaatacgggtcgcgccatcagtcttccaagtactcgccctcctcgtcctcgacttcatccacctcttctatgtaaggaagctcacaccctgcagcctccatggccctgcgactgggttgccattgcaagtccgctcccatgtcaaagtagttctccccatcagttccggcccccgttagagccctttgcaagctgtgcataagttctctgtcgctcagctcgcgcctcctgctggcgctcaccgcgcggtgcatcctgtcattgcgatacacccccagatcgtcgcttaaagtcaacaccttgagagtcatgcgcatgtaaaacccatctatcttcacctccttgtcaatgggtacgtagggggtcttgtagatcttgcgagcgtagtatttgcccaggctcaagaccgagtagttgatagctgccactttctcagccaaacccaggctacgttcctgcactataatactttgcaggatgttaatcagatcatacagccatctcccatcaggctcggtgatattcaacaacgcctccctgaatgcctcgttgtccctgctatgttgaaccaccagaaacagctgagctgtcaggggtttgctagtggggttctgggtgatagcctccatcaggtcccacaggtgcatcagacccagggtcacttcctcgcgggcgatcagggtgcgcacatggttgttaaaagatttttggaagttgcgctcctccttcacggtctgctcgtaggccgagactaggttggccgcggccacatgtgccctagctgggctgatccctgtcacttcatcgacctcaaaatcctcgtcttgcagcacccgtcttcgatccagaccgtggcgcagctcgcgacccgcgttaaatcgagatgctcgcatctcctctggctcctcgccgctcctgtccctgaataggttctgttggggcacgtacgcctcgcgagagtccttttttagttgcacccgcgggtgccgctcgggcgatggagcccccaggcgcgccaatccctcgccctcttccaagtccagatcataggcgggctgtcccgcgccgctgacggctgcagccgcagtagttacaggagcaggaagagccttttgtggctgttgttgtagctgctgctgagaagggggctgttgctgggggcgcatctgtcgcagcacgggatgcatctgggcaacaaaaaacaaaaaaaagagggctcgctcccgtaaactggagaagtcggctggcggggtcttagaaatgacgaggctgccaaaccctcgcttgtcgcggaaaccggccgatccggcgcgctaagactcgaaccggggcacaccgcaacgcaaccctggcgattgattctccagactacgggcgcgagccactcccagccccgagaactgagtgttctaaagcttgacgcagcactggctcccatccaggaaaaagcaaaaaaaaaacgacccgcctccgtatcctggaggttttgtgcaggcctgggtcgagacgggagtgccagtaccacgttagctgcggctccagcctgatccgagattcgaaccggggtacacgcgcagcccaacccgttcgcttagcctccaggccacggagacgagccgctgaccgctttcgtttttgcccgtatgtctagagcatcaacgactgtgcgcgtctcacgggccaaaccgtgcctaccatgaactacttcatgccgctgcgcaacatctggaaccgcgtacgcgagttcccgcgggcatccaccaccgcctccggtatcacctggatgtccaggtacatctacggttatcaccgcctcatgctggaagacctcgcccctggcgccccggctacagagcgatggcccctataccgccagccgccgcctcactttctcatcggctaccagtacctggtgcgcacctgtaacgattacatctttgacacccgcgcctactcgcgcctcaagtacaccgagattgtgcgtccggggcaccagacagtcaactggtcagtcatggccaactgctcctacacaatcaacaccggggcttaccaccgcttcgtggactttgacgacttccaagccaccctcacccaggtgcagcaagccatcctcgcagaaagggttgtagcggacctggcacttgtccagcccatgcgcgggttcgggatcactcgcatgcatggcagagcgggcgaagaagaagtgcccgtggaacgactcatgcaagactactataaagatctggccagatgtcaggataatgcttggggaatggcccatcgcctgcgcatccaacaagccggacccaaagacctggtgctcctcgccaccatccgccgtctcaaaactgcctattttaatttcatcaccagcagcatcgtctcaccctccaaagaggaggaaggagaagaaagagagaaccccgaccgagcgtctagccgcccccgcccgcaagaaacagtgctcagcctaccttgcgattgcgactggttagacgctttcgtcgaaaggttttcagatcccgtggatcttgagacgatcaggtccttgcgcggagtacctacggggcaattgataaaatgcataatcagcgcggtgtccctgcccaacggagagcctcccagtcaccacttcagggagatgcgcggaggcgtcttcactctgagacccagggagaacggtcgtgccgtcaccgagaccatgcgccgccgccgcggagaggtcattgaaagattcatcgaccgtctgcctgtgcgccgccggcgtcgccgcgttccccctcctcctgcagccccacctgaagaggaagagatgttagtggaagaagaagaaattgaggaagaaatcccgggggctttcgagcgcgaggtgcgcaccaccatcgccgaactcatccgtcttctggaagaggagttgaccgtgtccgcgcgtaactcccagtttttcaactttgccgtggacttctacgaggccatggagcgcttggaagcgctgggcgatgttagcgagatgccgctgagacgatggatcatgtatttcttcgtcaccgagcacatcgccaccacactcaactaccttttccagcgcctatgcaactatgcggtcttcacccgccacgtggagctcaacctcgcccaggtggtcatgcgcgcgagagatcccgagggggctgtggtctacagccgcgtctggaacgaggcgggcatgaatgcattctctcaactcattggacgcatctccaacgaccttgcggccaccgtcgagagagcgggccgcggagatcttcaagaggaagagatcgagcagttcatggccgagatcgcctaccaggacaactctggcgacgtgcaagaaatccttaggcaagccgccgtcaacgataccgagattgattctgttgaactctctttcaggttcaagctcacggggccggtagcgttcacccagaggcgtcagatccaggatgtcaaccgccgcgtcgtcgcgcatgcaagtcttctcagggcgcagtaccagaacctacccgcgcgcggcgccgacgtaccactgccggccatgccgccgggtcccgagccgcccctgccgcccggtgcgcgccctcgacaccgcttctaaacatgcaagaagcaacagagccaccgccgcccaaacggaaaaacaagggcacggtggtagcgcccaaggggcacggaaccctgcaagccatcgacatctccaccaacggacccgtggagatcaagtaccatctgaacctccctcacgccctcgaaaagatcatgcaagtcaatctcctgacactgcctactaacctgactccgcagcgtctcaggaccctggacagctccgacctgcgcgctctcgtcctcgagctccgcccctgccgcgccgaggtctggacttgcctcccgcgagggctcgtcagcatgaccaccatcgagacagaagatggtcatgccgatgcagacaacatagtagagcgcgaggtacaagcgccaggcctcaattttccactgaaatttctcgtcaaaggaagtcaggtacaactcattcatgaggtgcatcccgtgaatcgatgcgagtactgcggccgtctgtacaagcacaagcatgaatgctcggcgcgtcgcagggagttctacttccatcacatcaacagccattcctccaactggtggcaggagatccagttcttcccgattggctctcatcctcgcacagaaaggctcttcctcacctacgatgtggaaacctacacctggatggggtcctttggcaagcagctaatccccttcatgctggtcatgaaactctctggagaccagcggctcgtcaacatcgcctatgacctggctataaaactcaagtgggatcgctggcagcaggacccccaaaccttctattgcgtcaccccagaaaagatggcagtcgggcagcattttcgtcagtaccgggaccagttacaaacagcactggcagtggacctctggtcctccttcctcaaagcgaaccctcacctgcacgaatgggccctcgaacactatgctctcactgaccctacagacctcacttttgaagaactcaagaagctgcctcatgtcaggggcacacctcgattcttagaactgtacatagtggggcacaacatcaatggctttgatgagatcgtcttggccgctcaggttatcaataaccgagcagaggtccctcagcctttcagaatcacccgaaattttatgcccagggccggcaagatcctcttcaatgatgttactttcgctttgcccaaccccgcctacaagaagcgggtggacttccaactctgggaacagggggcctgtgatgacatcgacttcaagtatcaattcctcaaagtcatggtcagggacacttttgccctcactcatacctcgctgcgcaatgcagcccaagcatactctctcccagtggagaagggatgctgtccctacaaggcagtcaatcaattctacatgttgggctcttaccgtgcagaaaaagacgggtttcccctcgaagagtactggaaggatcgcgaagaataccttctcaaccgcgagctgtgggaaaagaaaaaccaaccgcgttatgacatcatccaggaaactctcgactactgtgccctagacgtacttgtcaccgccgagctggtagccaagctgcaagagtcatatgcccacttcataagggactctgtaggcctccctcatgcccattttaacatattccagagacctactatctcttccaattcccatgccatctttcgccagatcgtttacagggcggaaaaacccaaccgcaccaatctgggcccgggtcttctcgccccctcacatgaactctatgactatgtgcgagcaagcatcagaggggggcgctgttatcccacttacatcggcatcctcgaagagcccctctatgtctacgatatctgtggcatgtatgcctccgcgctcacccaccccatgccctggggcacccctcttaacccctatgagcgcgcgctggcagttcgagaatggcagatgactttggatgatcccgccaccatcagctattttgacaaggatttgctaccgggaatatttaccatagatgcggacccccctgatgagttcatgctagaccccctcccccctttctgttcaagaaaaggaggtcgactctgctggaccaatgagcccctccgaggcgaggtagccaccagtgtggatctgataaccctgcacaataggggatggcgagtcagaatagttccggatgaactgacaaccatcttccctgaatggaaatgtgtggcgcgcgagtacgtccagcttaacatcgccgccaaggagcgcgcggacaaggaaaagaaccaaaccatgcgctctatcgccaagcttctatccaatgccctctatggatcatttgccaccaagctggacaacaagaagattgtgttttctgaccagatggacgagagtcttatgaaaggcatctctgctggtactgtcaatatcaaatcctcctcgttcctagaaactgacaacctgagtgcagaggtcatgcccgccttcgagagggaatacctaccccaacagctggcgctcctggacagcgatccggaagacagtgaagacgaacagaggcccgcccccttttatacccccccggcggggacccctggtcacgtggcctacacttacaagccaatcacattcttggatgtggaggagggggacatgtgtttacataccgtagagaaggtggaccccctggttgacaacgaccgctacccctcccacgtggcctcctttgtgctggcctggacacgcgcttttgtatcagagtgggctgggttcctctacgaagaggaccgcggcactccgctcgaggacaggcccataaagtcagtctacggggacacggacagcctctttgttacccagcggggacacgaactcatggaaaccaaaggtaagaaacgcatcaaaaaacatggcggaaaacttgtttttgaccccgatgagccggatctgacatggctcgtggagtgcgaaaccgtctgcgcctcctgcggtgcggatgcatactcccccgaatccattttcctcgcgcccaagctgtatgccctcaaatgtatctactgccccgcctgccataaaacttccaaaggtaagctccgtgccaaaggccacgcggccgaggcgctcaactacgaactcatggtaaactgctacctggccgacatgcagggcgccgatcggcagcggttctcgaccagcaggatgagtctgaagcgcaccctcgcaagcgcccaaccaggcgcgcaccccttcaccgtgacggaaacaaccctgactcggacgctgcgaccatggaaggatcggaccctggcagcgctggacgcccatcgtctgattccctactccaggagccgtcccaacccgcgaaacgaggaggtctgctggatcgagatgccatagagcacatcaccgagctctgggaccggctcgagctcttgcaacagactctttccaaaatgcccatggctgacgggctgaagccgctgaaaaacttctcctcgctccaggagcttctatcccttgggggagagcgcctcctaacggacttggtgcgggaaaatatccatgtaagggaaatgatgaacgaagtggcccccctgctccgggaggacggcagctgtcgctccctaaactaccatctgcaacccgtaattggggtcatttacggtcccactgggtgcggcaagtctcagctgcttaggaatttgctctcatcccagttaatcaccccggctccagaaacagtattttttatagccccgcaggtggatatgatccccccctctgaactgaaagcctgggaaatgcaaatatgtgagggaaactatgctcccgggccagagggaactttcatcccccaatctggcacccttcgcccaaagtttattaaaatggcttatgatgacctgactcaggagcataactatgatgtttcagacccccggaacgtgttcgcccgtgccgctgcccacggccccatcgctatcattatggatgagtgcatggagaatctggggggtcacaaaggcgtctccaaattttttcatgcttttccctctaagctgcatgataaatttcccaagtgcaccggatacactgtcttggtggttctgcacaatatgaaccccagacgggatctaggcggcaacattgccaacctcaagatccagtccaaaatgcatataatttcaccccggatgcacccgtcccagctcaacagatttgtaaacacctacactaagggcctccccgttgcaattagtctgctcctaaaagatattgtgcaacaccatgcactccgaccttgctatgactgggtgatttataacactaccccggagcaagaggctcttcaatggagctatctccacccccgggacggactaatgcccatgtatctaaacattcaatcccacctttacagggtactggaaaagatccaccgagttctcaatgatcgagaccgatggtccagggcataccgcgcgcgaaaa

SEQ ID NO: 178 - DNA, 4157 bp, Human adenovirus
  misc_feature 1..4157: note = Human adenovirus 16, Ad16 E3
  source 1..4157: mol_type = genomic DNA
tataaaacgcctggtgatcagaggccgaggtatccagctcaacgacgagtcggttagctcttcgcttggtctgcgaccagacggagtcttccagatcgccggctgtgggagatcttccttcactcctcgtcaggctgtgctgactttggagagttcgtcctcgcagccccgctcgggcggcatcggaactctccagtttgtggaggagtttactccctctgtctacttcaaccccttctccggctctcctggccagtacccggacgagttcataccgaacttcgacgcaatcagcgagtcagtggatggctatgattgatgtctaatggtggcgcggctgagctagctcgactgcgacacctagaccactgccgccgctttcgctgtttcgcccgggaactcaccgagttcatctacttcgaactctccgaggagcaccctcagggtccggcccacggagtgcggattaccatcgaagggggaatagactctcgcctgcatcgcatcttctcccagcggcccgtgctgattgagcgcgaccagggaaatacaaccatctccatctactgcatttgtaaccaccccggattgcatgaaagcctttgctgtcttgtttgtgctgagtttaataaaaactgagttaagaccctcctacggactaccgcttcttcaatcaggactttacaacaccaaccagatcttccagaagacccagacccttcctcctctgatccaggactctaactctaccttaccagcaccctccactactaaccttcccgaaactaacaagcttggatctcatctgcaacaccgcctttcacgaagccttctttctgccaatactaccactcccaaaaccggaggtgagctccgcggtcttcctactgacgacccctgggtggtagcgggttttgtaacgttaggagtagttgcgggtgggcttgtgctaatcctttgctacctatacacaccttgctgtgcatatttagtcatattgtgctgttggtttaagaaatgggggccatactagtcgtgcttgctttactttcgcttttgggtctgggctctgctaatctcaatcctcttgatcacgatccatgtctagacttcgacccagaaaactgcacacttacttttgcacccgacacaagccgtctctgtggagttcttattaagtgcggatgggactgcaggtccgttgaaattacacataataacaaaacatggaacaataccttatccaccacatgggagccaggagttcccgagtggtatactgtctctgtccgaggtcctgacggttccattcgcattagtaacaacactttcattttttctgaaatgtgcgatctggccatgtttatgagcaaacagtatgacctatggcctcctagcaaagagaacattgtggcattttccattgcttattgcttggtaacatgcatcatcactgctatcatttgtgtgtgcatacacttgcttatagttattcgccctagacaaagcaatgaggaaaaagagaaaatgccttaacctttttcctcataccttttctttacagcatggcttctgttacagctctaattattgccagcattgtcactgtcgctcacgggcaaacaattgtccatattaccttaggacataatcacactcttgtagggcccccaattacttcagaggttatttggaccaaacttggaagtgttgattattttgatataatttgcaacaaaactaaaccaatatttgtaatctgcaacagacaaaatctcacgttaattaatgtcagcaaaatttataacggttactattatggttatgatagatccagtagtcaatataaaaattacttagttcgcataactcaacccaaatcaacagtgccaactatgacaataattaaaatggctaataaagcattagaaaattttacattaccaacaacgcccaatgaaaaaaacattccaaattcaatgattgcaattattgcggcggtggcattgggaatggcactaataataatatgcatgttcctatatgcttgttgctataaaaagtttaaacataaacaggatccactactaaattttaacatttaattttttatacagatgatttccactacaatttttatcattactagccttgcagctgtaacttatggccgttcacacctaactgtacctgttggctcaacatgtacactacaaggaccccaagaaggccatgtcacttggtggagaatatatgataatggagggttcgctagaccatgtgatcagcctggtacaaaattttcatgcaacggaagagacttgaccattattaacataacattaaatgagcaaggcttctattatggaaccaactataaaaatagtttagattacaacattattgtagtgccagccaccacttctgctccccgcaaatccactttctctagcagcagtgccaaagcaagcacaattcctaaaacagcttctgctatgttaaagcttcgaaaaatcgctttaagtaattccacagccgctcccaatacaattcctaaatcaacaattggcatcattactgccgtggtagtgggattaataattatatttttgtgcataatgtactacgcctgctgctatagaaaacatgaacaaaaaggtgatgcattactaaattttgatatttaattttttatagaattatgatattgtttcaatcaaataccactaacactatcaatgtgcagactactttaaatcatgacatggaaaaccacactacctcctatgcatacacaaacattcagcctaaatacgctatgcaactaagaaatcaccatactaattgtaattggaattcttatactatctgttattctttattttatattctgccgtcaaatacccaatgttcatagaaattctaaaagacgacccatctattctcctatgattagtcgtccccatatggctctgaatgaaatctaagatctttttttttctcttacagtatggtgaacatcaatcatgattcctagaaatttcttcttcaccatactcatctgtgctttcaatgtctgtgctactttcacagcagtagccactgcaagcccagactgtataggaccatttgcttcctatgcactttttgccttcgttacttgcatctgcgtgtgtagcatagtctgcctggttattaattttttccaactggtagactggatctttgtgcgaattgcctacctacgtcaccatcccgaataccgcaatcaaaatgttgcggcactttttaggcttatttaaaaccatgcaggctatgctgccagtcattttaattctgctcctaccctgcattgccctagcttccaccgccactcgcgctacacctgaacaacttagaaaatgcaaatttcaacaaccatggtcatttcttgattgctaccatgaaaaatctgattttcccacatactggatagtgattgttggaataattaacatactttcatgtacctttttctcaatcacaatataccccacatttaattttgggtggaattctcccaatgcactgggttacccacaagaaccacatgaacatatcccactacaacacatacaacaaccactagcactggtagagtatgaaaatgagccacaaccttcactgcctcctgccattagttacttcaacctaaccggcggagatgactgaaatactcaccacctccaattccgccgaggatctgcttgatatggacggccgcgcctcagaacagcgactcgcccaactacgcatacgccagcagcaggaacgtgccgccaaggagctcagggatgctattgaaattcaccaatgcaaaaaaggcatattttgtttggtaaaacaagccaagatatcctacgagattaccaatactgaccatcgcctctcatacgagctcggaccgcagcgacaaaaattcacttgtatggtgggaatcaaccccataatcatcacccagcaagctggagataccaagggttgcatccactgttcctgcagttccgccgagtgcatctacaccctgctgaagaccctctgcggccttcgagacctcctacccatgaactaatcaacccagcccctcacttaccaattacataaagccaattaataaa

SEQ ID NO: 179 - DNA, 1062 bp, Human adenovirus
  misc_feature 1..1062: note = Human adenovirus 16, Ad16 fiber
  source 1..1062: mol_type = genomic DNA
atggccaaacgagctcggctaagcagctccttcaatccggtctacccctatgaagatgaaagcagctcacaacacccctttataaaccctggtttcatttcctcaaatggttttgcacaaagcccagatggagttctaactcttaaatgtgttaatccactcactaccgccagcggacccctccaacttaaagttggaagcagtcttacagtagatactatcgatgggtctttggaggaaaatataactgccgcagcgccactcactaaaactaaccactccataggtttattaataggatctggcttgcaaacaaaggatgataaactttgtttatcgctgggagatgggttggtaacaaaggatgataaactatgtttatcgctgggagatgggttaataacaaaaaatgatgtactatgtgccaaactaggacatggccttgtgtttgactcttccaatgctatcaccatagaaaacaacaccttgtggacaggcgcaaaaccaagcgccaactgtgtaattaaagagggagaagattccccagactgtaagctcactttagttctagtgaagaatggaggactgataaatggatacataacattaatgggagcctcagaatatactaacaccttgtttaaaaacaatcaagttacaatcgatgtaaacctcgcatttgataatactggccaaattattacttacctatcatcccttaaaagtaacctgaactttaaagacaaccaaaacatggctactggaaccataaccagtgccaaaggcttcatgcccagcaccaccgcctatccatttataacatacgccactgagaccctaaatgaagattacatttatggagagtgttactacaaatctaccaatggaactctctttccactaaaagttactgtcacactaaacagacgtatgttagcttctggaatggcctatgctatgaatttttcatggtctctaaatgcagaggaagccccggaaactaccgaagtcactctcattacctcccccttctttttttcttatatcagagaagatgactga

SEQ ID NO: 180 - DNA, 126 bp, Human adenovirus
  misc_feature 1..126: note = Human adenovirus 16, Ad16 fiber tail
  source 1..126: mol_type = genomic DNA
atggccaaacgagctcggctaagcagctccttcaatccggtctacccctatgaagatgaaagcagctcacaacacccctttataaaccctggtttcatttcctcaaatggttttgcacaaagccca

SEQ ID NO: 181 - DNA, 360 bp, Human adenovirus
  misc_feature 1..360: note = Human adenovirus 16, Ad16 fiber shaft
  source 1..360: mol_type = genomic DNA
gatggagttctaactcttaaatgtgttaatccactcactaccgccagcggacccctccaacttaaagttggaagcagtcttacagtagatactatcgatgggtctttggaggaaaatataactgccgcagcgccactcactaaaactaaccactccataggtttattaataggatctggcttgcaaacaaaggatgataaactttgtttatcgctgggagatgggttggtaacaaaggatgataaactatgtttatcgctgggagatgggttaataacaaaaaatgatgtactatgtgccaaactaggacatggccttgtgtttgactcttccaatgctatcaccatagaaaacaacacc

SEQ ID NO: 182 - DNA, 573 bp, Human adenovirus
  misc_feature 1..573: note = Human adenovirus 16, Ad16 fiber knob
  source 1..573: mol_type = genomic DNA
ttgtggacaggcgcaaaaccaagcgccaactgtgtaattaaagagggagaagattccccagactgtaagctcactttagttctagtgaagaatggaggactgataaatggatacataacattaatgggagcctcagaatatactaacaccttgtttaaaaacaatcaagttacaatcgatgtaaacctcgcatttgataatactggccaaattattacttacctatcatcccttaaaagtaacctgaactttaaagacaaccaaaacatggctactggaaccataaccagtgccaaaggcttcatgcccagcaccaccgcctatccatttataacatacgccactgagaccctaaatgaagattacatttatggagagtgttactacaaatctaccaatggaactctctttccactaaaagttactgtcacactaaacagacgtatgttagcttctggaatggcctatgctatgaatttttcatggtctctaaatgcagaggaagccccggaaactaccgaagtcactctcattacctcccccttctttttttcttatatcagagaagatgac

SEQ ID NO: 183 - DNA, 3633 bp, Human adenovirus
  misc_feature 1..3633: note = Human adenovirus 16, Ad16 penton
  source 1..3633: mol_type = genomic DNA
atgaggagacgagccgtgctaggcggagcggtggtgtatccggagggtcctcctccttcttacgagagcgtgatgcagcaacaggcggcgatgatacagcccccactggaggctcccttcgtaccccctcggtacctggcgcctacggaagggagaaatagcattcgttactcggagctgtcaccccagtacgataccaccaagttgtatctggtggacaacaagtcggcggacatcgcctccctgaactatcagaacgaccacagcaacttcctgaccacagtggtgcagaacaatgactttacccccacggaggctagcacccagaccattaactttgacgagcggtcgcggtggggcggtcagctgaagaccattatgcacaccaacatgcccaacgtgaacgagtacatgttcagcaacaagtttaaggcgagggtgatggtatctaggaaggctcctgaaggtgttacagtaaatgatcataaagatgatattttgaaatatgagtggtttgagttcactttaccagaaggtaacttctcagctaccatgaccatcgacctgatgaacaatgccatcattgacaactacctgaaaattggcagacagaatggagtgctggaaagtgacattggtgttaagtttgacactagaaacttcaggctcgggtgggaccccgaaactaagttgattatgccaggggtctacacttatgaggcattccatcctgacattgttttgttgcctggttgcggggtagattttactgaaagccgacttagcaacttgcttggcatcaggaagagacatccattccaggagggtttcaaaatcatgtatgaagatcttgaagggggtaatattcctgcccttttggatgtcactgcctatgaggaaagcaaaaaggataccactactgaaacaggcgaaaaggcggtggttaaaacaaccacagtggctgttgcagaggaaaccagtgaagatgataatataactagaggagatacttatataactgaaaaacaaaaacgtgaagctgcagctgcagaactattacttatgtctgaagttaaaaaagagttaaagatccaacctttagaaaaagacagcaagaatagaagctacaatgtcttggaagacaaaatcaacacagcctaccgcagctggtacctgtcctacaattatggtaaccctgagaaaggaataaggtcctggacactgctcaccacttcggatgtcacctgtggagccgagcaggtctactggtcgctccccgacatgatgcaagaccccatcaccttccgctcctcgagacaagtcaacaactacccagtagtgggtgcagagcttatgccggtcttctcaaagagtttctacaatgagcaagccgtgtactctcagcagctccgacagtccacctcgctcacgcacgtcttcaaccgcttccctgagaaccagatcctcatccgcccgccggcgcccacaattaccaccatcagtgaaaacgttcctgctctcacagatcacgggaccctgccgttacgcagcagtatccggggagtccagcgcgtgaccgttactgacgccagacgtcgcacctgtccctacgtttacaaggccctgggcatagtcgcgccgcgcgttctttcaagccgcactttctaaaaaaaaaaaaaaatgtccattctcatctcgcccagtaataataccggttggggactgcatgcgcccaccaagatgtacggaggcgcccgcaaacgctctacccagcaccccgtgcgcgttcgcggtcatttccgcgctccctggggcgccctcaagggccgtacccgcactcggaccacggtcgatgatgtgatcgaccaggtggttgccgatgctcgtaattatactcctactgcgcctacatctactgtggatgcagttattgacagtgtagtggcagacgctcgcgcctatgctcgccggaagagccgaaggaggcgcatcgccaggcgccacagggctactcccgctatgcgagctgcaaaagctattctgcggagggccaaacgtgtgggacgaagagccatgcttagagcggccagacgcgcggcttctggtgctagcagcggcaggtcccgcaggcgcgcggccacggcggcagcagcggccattgccaacatggcccaaccgcgaagaggcaatgtgtattgggtgcgcgatgccactaccggccagcgcgtgcccgtgcgcacccgcccccctcgcacttagaagatactgagcagtctccgatgttgtgtcccagcggcaagtatgtccaagcgcaaatacaaggaagagatgctccaggtcatcgcgcctgaaatctacggtccgccgatgaaggatgaaaaaaagccccgcaaaatcaagcgggttaaaaaggacaaaaaagaagaagatggcgatgatggactggtggagtttgtgcgcgagttcgcgccaagacggcgcgtgcagtggcgcggtcgaaaagtacgccaagtgcttagacccgggaccactgtggtctttacacctggcgagcgttccagcactacttttaaacggtcctatgatgaggtgtatggggatgacgatattattgagcaggcggcagaccgccttggcgagtttgcttatggcaagcgcacaagatccagtcccaaagaggaggcggtatctattcccttggatcatggaaatcccacccctagcctcaaaccagtcaccctgcagcaagtgctgcccgtacctgcgagcagaggcgtaaagcgcgagggtgaggacctatatcccaccatgcagctaatggtgcccaagcggcagagattagaagacgtactggagaaaatgaaagtggatgccgatatccagcctgaggtgaaagtgagacccatcaaggaagtggcgccaggtttgggagtacaaacctttgacatcaagattcccactgagtccatggaagtgcagaccgaacctgcaaaacccacagtcacctcaattgaggttcagacggaaccctggatgcccgcgcccgttgccgcccccagcaccactagaagatcacgtcgaaagtatggcccagcaagtctgctaatgcccaactatgctctgcacccatccatcattcccactccgggttacagaggcactcgctactatcgaagtcggagcaacacctcacgccgccgcaaactacctgcaagtcgcactcgccgtcgccgccgccgcaccactgccagcaaattaactcccgccgccctggtgcggagagtgtaccgcgatggtcgcgctgaacctctgacgctgccgcgcgcgcgctatcatccaagcatcaccacttaatgactgttgacgctgcctccttgcagatatggctctcacttgccgccttcgcgtccccattactggctaccgaggaagaaactcgcgccgtagaaggatgttggggcgagggatgcgccgccacagacgaaggcgcgctatcagcaagcgattagggggtggctttctgccagctcttatacccatcatcgccgcggcgatcggggcgataccaggcatagcttccgtggcggttcaggcctcgcagcgccactaacaatggaaaaatttataaataaa

SEQ ID NO: 184 - DNA, 2823 bp, Human adenovirus
  misc_feature 1..2823: note = Human adenovirus 16, Ad16 hexon
  source 1..2823: mol_type = genomic DNA
atggccaccccatcgatgatgccccaatgggcatacatgcacatcgccggacaggatgcttcggagtacctgagtccgggtctggtgcagttcgcccgtgcaacagacacctacttcagtatggggaacaagtttagaaaccccacagtggcgcccacccacgatgtgaccaccgaccgtagccagcgactaatgctgcgcttcgtgcccgttgaccgggaagacaatacctactcttacaaagttcgctacacgctggctgtaggggacaacagagtactggatatggccagcacgttctttgacatccgcggcgtgctggaccggggccctagcttcaaaccctactccgggaccgcctacaacagcctggctcccaagggagcgcccaacacctgccagtggaaggattctgacagcaaaatgcatacctttggggtagctgccatgcccggtgttactgggaaaaagatagaagctgatgggctgcctattggaatagattcaacttctggaactgacacagtaatttatgctgataaaactttccaaccagaaccacaagttggaaatgccagttgggttgacgccaatggtacagaggaaaaatatggaggcagagctctgaaggacactacaaagatgaaaccctgctatggttctttcgccaagcctaccaacaaagaaggtggtcaggctaacttaaaagattcagaaaccgccgccaccactcctaactatgatatagatctggctttctttgacaacaaaaatattgctgctaactacgatccagatattgtaatgtacacagaaaatgttgacttgcagactccagatactcatattgtatacaaacctggaacagaggacaccagctctgaatccaatttgggtcagcaagccatgcctaacagacccaactacattggcttcagagacaattttattgggctcatgtactacaacagcactggcaatatgggggtgctggccggtcaggcctctcagctgaatgctgtggttgacttgcaagacagaaacactgaactgtcctaccagctcttgcttgactctctgggtgacagaacccggtatttcagtatgtggaatcaggcggtggacagctatgatcctgatgtgcgtattattgaaaaccatggtgtggaggacgaattgccaaactattgctttccgttgaatggtgtgggatttacagacacttaccaaggtgttaaagttaaaacagatgcagttgctggaaccagtggaacacagtgggacaaagatgacaccacagttagtactgctaatgaaatccatggaggcaatccttttgccatggaaatcaacatccaagccaatctatggcgaagtttcctttattccaatgtggctttgtatctcccagactcgtataaatacaccccgtccaatgtcactctcccagaaaacaaaaacacctacgactacatgaacgggcgggtggtgccgccatctctagtagacacctatgtgaacattggtgccaggtggtctctggatgccatggacaatgtcaacccattcaaccaccaccgtaacgctggcttgcgttaccgatccatgcttctgggtaacggacgttatgtgcctttccacatacaagtgcctcaaaaattcttcgctgttaaaaacctgctgcttctcccaggctcctacacttatgagtggaactttaggaaggatgtaaacatggttctacagagttcccttggtaacgacctacgggtagatggcgccagcatcagtttcacgagcatcaatctttatgctacttttttccccatggctcacaacaccgcttccacccttgaagccatgctgcggaatgacaccaatgatcagtcattcaacgactacctatctgcagctaacatgctctaccccatacctgccaacgcaaccaatattcccatttccattccttctcgcaactgggcggctttcagaggctggtcatttaccagactgaaaaccaaagaaactccctctttggggtctggatttgacccatactttgtctattccggttctattccctacctggatggtaccttctatctaaatcacacttttaagaaggtttccatcatgtttgactcttcagtgagctggcctggaaatgacaggttactatctcctaacgaatttgaaataaagcgcactgtggatggcgaaggctacaacgtagcccaatgcaacatgaccaaagactggttcttggtacagatgctcgccaactacaacattggctaccagggcttttacatccctgagggatacaaggatcgcatgtactcctttttcagaaacttccagcctatgagcaggcaggtggttgatgaggttaattacactgactacaaagccgtcaccttaccatatcaacacaacaactctggctttgtaggataccttgcgcctactatgagacaaggggaaccttacccagccaattatccatacccgctcatcggaactactgccgttaagagtgttacccaaaaaaagttcctgtgcgacaggaccatgtggcgcataccgttctccagcaacttcatgtccatgggggcccttacagacctgggacaaaacctgctctatgccaactcggcccatgcactggacatgacttttgaggtggatcccatggatgagcccaccctgctttatcttcttttcgaagtcttcgacgtggtcagagtgcaccagccacaccgcggcgtcatcgaggccgtctacctgcgcacaccgttctcggccggcaacgccaccacataa

SEQ ID NO: 185 - protein, 353 aa, Human adenovirus; identical to SEQ ID NO: 73
  REGION 1..353: note = misc_feature - Human adenovirus 16, Ad16 fiber

SEQ ID NO: 186 - protein, 130 aa, Human adenovirus
  REGION 1..130: note = misc_feature - Human adenovirus 16, Ad16 fiber shaft
DGVLTLKCVNPLTTASGPLQLKVGSSLTVDTIDGSLEENITAAAPLTKTNHSIGLLIGSGLQTKDDKLCLSLGDGLVTKDDKLCLSLGDGLITKNDVLCAKLGHGLVFDSSNAITIENNTLWTGAKPSAN

SEQ ID NO: 187 - protein, 181 aa, Human adenovirus
  REGION 1..181: note = misc_feature - Human adenovirus 16, Ad16 fiber knob
CVIKEGEDSPDCKLTLVLVKNGGLINGYITLMGASEYTNTLFKNNQVTIDVNLAFDNTGQIITYLSSLKSNLNFKDNQNMATGTITSAKGFMPSTTAYPFITYATETLNEDYIYGECYYKSTNGTLFPLKVTVTLNRRMLASGMAYAMNFSWSLNAEEAPETTEVTLITSPFFFSYIREDD

SEQ ID NO: 188 - protein, 555 aa, Human adenovirus; identical to SEQ ID NO: 74
  REGION 1..555: note = misc_feature - Human adenovirus 16, Ad16 penton

SEQ ID NO: 189 - protein, 940 aa, Human adenovirus; identical to SEQ ID NO: 75
  REGION 1..940: note = misc_feature - Human adenovirus 16, Ad16 hexon

SEQ ID NO: 190 - protein, 42 aa, Human adenovirus
  REGION 1..42: note = misc_feature - Human adenovirus 16, Ad16 fiber tail
MAKRARLSSSFNPVYPYEDESSSQHPFINPGFISSNGFAQSP

SEQ ID NO: 191 - DNA, 114 bp, Human adenovirus
  misc_feature 1..114: note = Human adenovirus 21, Ad21 5? (left) ITR
  source 1..114: mol_type = genomic DNA
ctatctatataatataccttatagatggaatggtgccaatatgcaaatgaggtaatttaaaaaagtgcgcgctgtgtggtgattggctgcggggtgaacggctaaaaggggcgg

SEQ ID NO: 192 - DNA, 114 bp, Human adenovirus
  misc_feature 1..114: note = Human adenovirus 21, Ad21 3? (right) ITR
  source 1..114: mol_type = genomic DNA
ccgccccttttagccgttcaccccgcagccaatcaccacacagcgcgcacttttttaaattacctcatttgcatattggcaccattccatctataaggtatattatatagatag

SEQ ID NO: 193 - DNA, 365 bp, Human adenovirus
  misc_feature 1..365: note = Human adenovirus 21, Ad21 Packaging Sequence
  source 1..365: mol_type = genomic DNA
gcaatgctgggaggtgacgtaacttatgtaggaggagttatgttgcaagttatcgcggtaaaggtgacgtaaaacgaggtgtggtttggacacggaagtagacagttttcccacgcttactgacaggatatgaggtagttttgggcggatgcaagtgaaaattctccattttcgcgcgaaaactgaatgaggaagtgaatttctgagtcatttcgcggttatgacagggtggagtatttgccgagggccgagtagactttgaccgtttacgtggaggtttcgattaccgtgtttttcacctaaatttccgcgtacggtgtcaaagtcctgtgtttttacgtaggtgtcagctgatcactagggta

SEQ ID NO: 194 - DNA, 3432 bp, Human adenovirus
  misc_feature 1..3432: note = Human adenovirus 21, Ad21 E1
  source 1..3432: mol_type = genomic DNA
tttaaacctgtcgagttccgtcaagaggccactcttgagtgccagcgagaagagttttctcctccgcgctgcgagtcagttttgcgctttgaaaatgagacacctgcgattcctgccacaggagattatctccagcgagaccgggatcgaaatactggagtttgtggtaaataccctgatgggagatgacccggaaccgccagtgcagcctttcgatccacctacgctgcacgatctgtatgatttagaggtagacgggcctgatgatcccaatgaggaagctgtaaatgggttttttactgattctatgctgctagctgccgatgaaggattggacataaaccctcctcctgggacccttgataccccaggggtggttgtggaaagcggcagaggtgggaaaaaattgcctgatctgggagcagctgaaatggacttgcgttgttatgaagagggttttcctccgagtgatgatgaagatggggaaactgaacagtccatccataccgcagtgaatgagggagtaaaagctgccagcgatgtttttaagttggactgtccggagctgcctggacatggctgtaagtcttgtgaatttcacaggaataacactggaatgaaagaactattgtgctcgctttgctatatgagaatgcactgccactttatttacagtaagtgtatttaagtgaaatttaaaggaatagtgtagctgtttaataactgttgaatggtagatttatgtttttacttgcgattttttgtaggtcctgtgtctgatgatgaggcgccttctcctgattcaactacctcacctcctgaaattcaggcgcccgtacctgcaaacgtatgcaagcccattcctgtgaagcctaagtgtgggaaacgccctgctgtggataagcttgaggacttgttggagggtggggatggacctttggaccttagtacccggaaactgccaagacaatgagtgccctgcagctgtgtttatttaatgtgacgtcatgtaataaaattatgtcagctgctgagtgttttattgcttcttgggtggggacttggatatataagtaggagcagatctgtgtggttagctcatagcaacctgctgccatccatggaggtttgggctatcttggaagacctgagacagactaggctactgctagaaaacgcctcggacggagtctctggcttttggagattctggttcggtggtgatctagctaggctagtgtttaggataaaacaggactacagggaagaatttgaaaagttattggacgacagtccaggactttttgaagctcttaacttgggccaccaggctcattttaaggagaaggttttatcagttttagatttttctactcctggtagaactgctgctgctgtagcttttcttacttttatattggataaatggatccgccaaacccacttcagcaagggatacgttttggatttcatagcagcagctttgtggagaacatggaaggctcgcaggatgaggacaatcttagattactggccagtgcagcctctgggagtagcagggatactgagacacccaccggccatgccagcggttctggaggaggagcagcaggaggacaatccgagagccggcctggaccctccggtggaggagtagctgacctgtttcctgaactgcgacgggtgcttactaggtctacgtccagtggacaggacaggggcattaagagggagaggaatcctagtgggaataattcaagaaccgagttggctttaagtttaatgagccgtaggcgtcctgaaactgtttggtggcatgaggttcagagcgaaggcagggatgaagtttcaatattgcaggagaaatattcactagaacaacttaagacctgttggttggaacctgaggatgattgggaggtggccattaggaattatgctaagatatctctgaggcctgataaacagtatagaattactaagaagattaatattagaaatgcatgctacatatcagggaatggggcagaggttataatagatacccaagataaagcagcttttagatgttgtatgatgggtatgtggccaggggttgtcggcatggaagcagtaacatttatgaatattaggtttaaaggggatgggtataatggcattgtatttatggctaacactaagctgattctacatggttgtagcttttttgggtttaataatacttgtgtagaagcttgggggcaagttggtgtgaggggttgtagtttttatgcatgctggattgcaacatcaggtagggtcaagagtcagttgtctgtgaagaaatgcatgtttgagagatgtaatcttggcatactgaatgaaggtgaagcaagggtccgccactgcgcagctacagaaactggctgcttcattctaataaagggaaatgccagtgtgaagcataatatgatctgtggacattcgaatgagaggccttatcagatgctgacctgcgctggtggacattgcaatattcttgctaccgtgcatatcgtttcccatgcacgcaagaaatggcctgtatttgaacataatgtgattaccaagtgcaccatgcacataggtggtcgcaggggaatgtttatgccttaccagtgtaacatgaatcatgtgaaggtgatgttggaaccagatgccttttccagagtgagcttaacaggaatctttgatatgaatattcaactatggaagatcctgagatatgatgacactaaaccgagggtgcgcgcatgcgaatgcggaggcaagcatgctagattccagccggtgtgcgtggatgtgactgaagacctgagacccgatcatttggtgcttgcctgcactggagcggagttcggttctagtggtgaagaaactgactaaagtgagtagtggggcaatatgtggatggggactttcaggttggtaaggtggacagattgggtaaattttgttaatttctgtcttgcagctgccatgagtggaagcgcttcttttgaggggggagtatttagcccttatctgacgggcaggctcccatcatgggcaggagttcgtcagaatgtcatgggatccactgtggatgggagacccgtccagcccgccaattcctcaacgctgacctatgccactttgagttcgtcatcattggatgcagctgcagccgccgccgctactgctgccgccaacaccatccttggaatgggctattacggaagcatcgttgccaattccagttcctctaataacccttcaaccctggctgaggacaagctgcttgttctcttggctcagctcgaggccttaacccaacgcttaggcgaactgtctaagcaggtggcccagttgcgtgagcaaactgagtctgctgttgccacagcaaagtctaaataaagatctcaaatcaataaa

SEQ ID NO: 195 - DNA, 19688 bp, Human adenovirus
  misc_feature 1..19688: note = Human adenovirus 21, Ad21 E2
  source 1..19688: mol_type = genomic DNA
atggccagccgcggaggaaatcagtcaagcgaccgccaacgggagcacacccccgaacgcggaatgggctctgccagccatccgcctccaaggccggaccgcagcccatctcagtcgcctccacctctgcccccgaagaggaacacctaccgtcgcgtggggtccgattcttctatcgagagccaggtggtactggtaagcgaaacttcgcggtcatccctgtctccggaacggagcaacagtcctcccccgatccctcccaagaagaagcccaggaagaccaagcatgtccctctgcaagacatcagccaggacagcgaagaagaaagagaacaggctcagttggtggccgtgggcttcagctaccccccggtgcgcatcattgagaaggatggcaagagaagtgttgagaagatcgacaagaatgaccctatagctaaaggagctacttctattgctgttaggaatcctttgagcttgcccctggtatctgcctgggagaagggcatggaagtgatggctgtgctaatggagaggtataggctggataatgacctgagaacctctttcaagctgatgccagagcagcacgagcagtacaagcgtatctgccaccagtatgtgaacgaggagcaccgtggcatcccgctgacatttagtagcatgaagaccctgacagcgatgatgggaagattcatgcagggattggtgcattcttattctgagatcgcccacaataattgggagtgcaccgggtgcgctctgtgggctcatggatgcaccgattacgaaggcaaggtgaaatgcctgcatggcactattatgatccagaaggaccacattatcgagatggatgtggcgagcgaaaacgggcagcgcgctatgaaggagaacccagacagagccaagatcacccagaaccgctggggcagaaatgtggtccagttggccaacaacgatgcccgctgctgtgtgaatgatgccaactgtgctactaaccaattttccagcaagtcctgtgggatgttttacaccgagggaagtaaggctcaggaagctttcaagcagtacgaagccttcatgaaggccgtgtacccagggataacccccgaccaagccaggatgatgctgatccccattcattgcgattgcaaccacaagccaggctgcgctcccgtgatgggcaggcagacctgtaagatgaccccctttggaatggccaatgctgaagacttggatgtgactaccatcagtgacccgaccgtgctggcaagcgtgagacacccagccttgatggtgttccagtgttgcaacccagtgtaccgcaactcccgtgtccagaatgccggccccaactgtgatttcaagatctctgctcctgacctgcttggcgccctgcaactgaccagaaagttgtggcaagacacctttcccgaaattccagttcccaagctggtgatccccgagttcaagtggcagaacaggttacagttccgcaacgtctccctgcccacgggtcactctgactcacgccagaacccatttgatttctgagtgaatgatgaaaacgaatgagcaaaaaaccagagccttagtgcatgtaaaaataaagtgctttttattgaacacggttttacatgacttattgcatatccatacggtcaaacgcggtggccctttcgatgcgtgcgcggtgagaacgaaagtaagatgagtgggtgtttaggaagcgatatagcgcctcctggttgcgacgcagggtgggctggacttggggtgattggagcatgctgtttgacaccccagtcagcaacttcatggtggggtttccgttcatggggcggtcgggccagtgcacaaaggcatgaaggaacatacagcaaaaaagtccacaggcggctgagcgcgggccctgcacgctctgggtggacttttccagggtgatgcagcggtctttggtagcaagggcactgcggcgcaggagcccctcgtactcaaactggtaaatctgtttgagtcgctcatccgagaacccaaaaggatcaaaaaggtagcaggtgttggagcgcgggttccaaccaaaagccagccagtgctctccccccgtctcgcgtccggcagtgttgactatggcgcaggcgagcttgtcgggggccatgaaccccgggaaacgcttgtcaaaggttcccaggaaatagggtccgcagcccaggtctcggacgatggctttgagctcttgctcgctggagccgtttccggacccgcatgacatggctgcagctgctgcttgcaagaagcaagaggcttcttatgtggtggcgttgccggccgagaacggtgtgcgcaggtagacggcctcgatgacgccgcggtgtggctggtgcactctgaccacgtcgaagacttcgaaaagaagataaagcagggtgggctcatccatgggatccacctcaaaagtcatgtccagcgcatgggccgagttggcatacagcaagttctgtcccaggtctgtaagggcacccatggacatgaagttgctagagaatgggatgcgccacatggtcctgtcgcacaggaattttttctgggtgacactggttactgcagtggttccaattagggggtatgggtagttagcagggtacgcttgaccctgacgcatggtaggagccatgtaacccacaaagccagagttattatgctggtagggtacggcgacagctttatagtctttgtagttaatctcatcaaccacctgtctactcatgggctggaagtttctgaagaaggagtacatgcgatccttgtaaccctcaggaacgtagaagccctggtatccaatgttgtagttggcaagcatctggaccaggaaccagtctttggtcatgttacattgggccacattgtagccttccccatcaactgtgcgcttgatttcgaactcatttggacttagcaatctgtcattaccaggccagctcactgaagagtcaaacatgatggagactttcttgaaagtgtggttaaggtagaaggtaccatccaggtagggtatagaaccagagtaaacaaagtagggatcgaaccctgatcccaaagagggagtctccttggttttgagtctggtgaaggaccagcctctgaaggcggcccagttgcgagagggaatggagatgggaacgttggtagcgttggccgggatggggtagagcatgttggcagcagaaaggtagtcattgaatgattgatcattggtgtcattgcgcagcatggcttcaagggtggaggcagtgttgtgggccatggggaagaaggtggcatagagattgatgctggtaaaacttatgctggcaccatcgacccggagatcattaccaagggaactctgcaggaccatgttcacatcctttctgaagttccactcgtaggtgtaagaaccgggtagaagcagcaggttcttcacagcaaagaatttctgaggcacttgaatgtggaaaggcacgtaacgaccattgcccaaaagcatggaccggtatcgcaggccagcgttgcggtgatggttaaaggggttgacattgtccatggcatccaaagaccatctggcgccaatgtttacgtaggtatccaccagggatgggggaaccacccgcccattcatgtagtcataagtgttggtgttagttggaagagtgacattggctggggtgtatttgtaggagtctgggagatacagagccacattggaataaagaaaacttctccagagattagcttggaggttaatttccatggcaaagagatttccttgtccaatttcacttgttccatttatgtcaggctctttccaatctgcaccctgtccgtttggttcaattattttgtaactacttattggtacccctactccatccaatggaaagcagtagttgggaagctcatcttccaccccatgattttcaataatgcgcacatcaggatcatagctatcgactgcttgattccacatgctgaagtatctggttctgtcacccagagagtcaagcagtagttgatatgatagttctgtgtttctgtcctgcaagtcaaccaccgcattcaattgggatgcttgacctgccagcactcccatgttgccagtactgttgtagtacataagtccaataaagttatctctaaagccaatgtagttgggtctgttgggcatagattgttgacccagattagcatgagaactttcttctgaagtaccaggtttgtacaccacatgagtgtctggggtttccaagtctacattttctgcatacatcacaatttttggactgaagtttgctttctgtgacgcttcatcaaaaaagttcatgtcaatatcatattcaacctgctggttttgcggttgttcagtagttttttgttttgcctgtccgcctttgacgttagtgggtttagcaaaagacccatagcagggtttcattttagtttctggctttagagctctaccaccatacttctcagttgttccatctgtgtcagtccaagtttcatctcccacctgaggttctggttggtatagtttatctgcataaattggtttggcttcgccgtctgtaatttctgaaccaattggaagacctttgtctttagtgatatcaccaccttctgctttcactggggcatttccaaaagtgtaagtggtgagatttttctcttcctcttcgtcagatcccccatcttctttttttacgccttcagcaatccactgagatgtattgggagcgcccttaggggccaacgagttgtaagcagtgccagagtatggcttgaagctagggcctctatccaacacaccccgaatgtcaaagaaagtgctggccatatccagcactctgttgtcgcccacagccaaggtgtatcgaactttgtatgcgtaggtattgtcttcccggtcaacgggcacaaagcgcagcatcagccgctgactgcggtcggtggtcacatcatgggtgggcgccacggtggggttcctaaacttgttccccagattgaagtaggtgtctgtggcgcgggcgaactgcaccagacccggactcaggtactccgaagcatcctgtccggcgatgtgcatgtatgcccactggggcagcatcgatggggtggccatcttgaaatcaactcagcctcggcgcgcgacctcttccttgctcctctgctgttgctgcggcggcggcgtgatgatgacacatacacacagacaggcaagttaagcgctactccatattaatttaaaagcagcgacggcgctttacactttgcacgcccagacccacgatgctgttcagagtactctgccagtttgcattcggacgtggagtgcccccaggacgcggtctggctacggcgacgggctgtacggtggtgggcttcggggtagcgacaggcttgcgagcaggcgctgcaacagcagggggaggcaagtccaaggtagcgggtcggtgtgactgagaaggtttcattaccccggtagccatgggggctacaggtctggtggtgggcattccaagcttcactgcctcctcgtaggagggcgggtcgtctgagcgtgtgactagtgtctcctccagatcggggcgcggacgcttgtcgccccgcttttcaaggggagggagatcttcctccacttccatttcacccggggctgacggcggcgggtcaatgcggctgtttatctgtttctgcacggcctggttggccagatccaccaccccattgataccagaggcgattccatcaaccaccttctgttggaagttttgctctttaagcttatttctcaatgcctgccctgtgctgctgttccaagctttgttcccataggtttttatggtagagccaaaatttttaagcccgctccagatactgctccaattgaaggcgcccccgttcagttggctggtgccgatgtcgctccaggtgcccatgtacggcctcgtgccgtgtcgcggagccagggatgaaaaattgatgtcttccatctctacaaaaacatagtcacaggaccaggagcatcagagtccattctgttttatttataagtttttccaatgtcagtggcgctgcgaggcctgaaccgccacggaagctatgcctggtatcgccccgatcgccgcggctatgatggggatcagagcaggcagaaagccaccccccagcctcttgctgatagcgcgccgccgcctgtggcgtcgcattccgcgccccaacatccctcttctacggcgcgagtttcttcctcggtagccagtaatggggacacgaaggcggcaagtgagggccatatctgcaaggaggcagcggcaacagttgttaagttgtgatgcttggatggtagcgtacgcgcggcaacgtcaggggatccgcgcggccatcgcgatacactctccgcaccagagcagcgggagtcagattgctggtggggcggcggcgacgacggtgactacgacttgcaggtgttttgcggcgacggcgggaagtgctgctcctgctgcggtagtagcgagtgcctcggtaacccggagttggaataatggatgggtgcagagcataatttggcatcagcaaacttgctggaccgtactttcgccgggatcttcgagtggtgttgacagcagctggagttgtaacgggtgcggtcatccagggatccgtttgcacctcaatggaggtggttgtgggctttgcaggttcggtttggacttccatggactcggtgggaatcttgatgtctacggtttgtactcccaaacctggcgccacctgcttgatgggtctcactttgacctcaggttgtatatcgggatccactttcattttctccagcacgtcctccagccgctggcgcttgggcaccatcaattgcatagtgggatacagatcctcaccctctcgcttgttgcctctgcgtggaggcacgggcagcacttgctgcagggtgactggcttgagactaggggtgggattcccattgtccaagggaatggacaccgcctcctccttggggctcgagcgggagcgcttgccataagcaaactcgcccaggcggtcggccgcctgctccagaatatcatcatccccatacacctcatcataggaccgcttaaaagcagtgctggagcgctcgccgggcgtaaagaccaccgtggttccaggtctcagcacaggccgcactttgcgtccacgccactgcacacgccgccttggggcgaactcgcgtacaaactccgccagaccatcattgccatcttcttcctttttgtcctttttgacccgcttgattttgcggggctttttttcatccttcaccggcggaccgtagatttcaggcgcgatgacctggagcatctcttccttgtatttgcgcttggacatcctcgctgggacacaacatcggagactgctcagtatcttctaagagcgaggggggcgggtgcgcacgggcacgcgctggccggtggtggcgtcgcgcacccagtacacattgcctcttcgcggttgggccatgttggcaatggccgctgctgccgccgtggctgcgcgcctgcgggacctgccggcactggcacctgaagccgcgcgtctggccgctctaagcatagctcttcgccccacgcgtttggccctccgtagcagagctcttgccgctcgcatagcgggagtagcccggtggcgcctggcgatgcgtctccgcctgctcttccggcgagcataggcgcgggcgtcagccactacgctgtcaataactgcatccacagtagatgtaggtgcagtaggagtataattacgagcatcggccaccacctggtcgatcacatcatcgacggtggttctagtgcgggcacgacccttgagggcgccccatggagcgcggaagtgcccgcgcacgcgcacagggtgctgtgtagagcgtttgcgagcacctccgtacatcttgcttggcgcgcgcaggccccaaccggtgttattactaggtgagataagaatggacatttttttttttagaaagtgcggcttgaaaggacgcgcggcgcgactatgcccagggccttgtagacgtaggggcaggtgcggcgtctggcgtcagtaacggtcacgcgctggactccccggatactgctgcgcaacggcagggtcccgtgatctgtgagagcaggaacgttttcactgacggtggtaatggtgggcgctggcgggcggatgaggatctggttctcagggaagcggttgaagacgtgcgtgagcgaggtggactggcgaagctgctgggagtacacggcttgctcgttgtagaaactctttgagaagaccggcatgagctctgcacctaccactggatagttgctgacttgtctcgtggaacggaatgtgacagggtcctgcatcatgtctgggagcgaccagtacacctgctctgctccacaggtgacatccgaggtggtgagcagtgtccaggaacggactcctttttcagggtcaccatagttgtaggacaggtaccagctgcggtaggctgtattcactttatcttccaagacattgtaacttctactcttgctgtctttttctacaggtttaatagtgagttttgtctctgtagtttcggccacagcagccaatagcgattcgtcagttgcaacagatgaagctgtatagttgtctcctctgacttcttctgcattagccacccttacagggtcgctgacaactatgttggctttagcaatagcagcagctttagcggcttctgttttggcttcttgttctttcttactgttctcataggcttctacatccaacagggccgggatattacccccttcaagatcctcatacaagatcttaaaaccctcctggaatgggtgtcttttcctgataccaagcaagttactaaggcgactttcagtaaagtcaactccgcaaccaggcaacaatacaatgtcaggatggaatgcctcataggtgtaaaccccaggcataatcaacttagtttccggatcccaacccagtctaaagttcctggtgtcaaatttaacaccaatgtcactctctaacactccattctgtctgcccacttcaaggtaattatcaatgatggcattgttcattaggtcaatggtcattgtggctgagaaattcccttccggtagagtaaactcaaaccactcatattccaaaatatcctgcttgtgatcataattgtcatctactgtgacaccttcaggagcctttctagacaccatcacccgagctttgaacttgttgctaaacatgtactcgttcacgttgggcatgttggtgtgcatgatagtcttcagctgaccgccccatcgcgaccgctcgtcaaagttgatggtctgggtgctggcctccgtgggggtaaagtcattgttttgcaccaccgtggtgaggaagttgctgtggtcgttctgatagttcagtgaggcgatgtccgcggacttgttgtccaccaaatacaaccgggtggtatcatacaatggtgccagctccgagtaacgaatgctgtttctcccctccgtaggtgccaggtaccgagggggtacaaagggagcctccagtggtggctgcatcgtcgccgccgccgcctgctgcatcacgctctcgtacgaaggaggaggaccctccggatacaccaccgctccgcctagcacggttcgcctcatcatactagatataacagagaagaaacgaacgcacgctggtcgccatggccttggtgagtatttattttcggtttcttacatcaggcgcccgacgcgggggcgcaggtgagcgaacgggttaccaccactcccacccaagtccaacacgctgctgtcgtcggcggaatcatcatcggcccacaccaggccccgctgcctgtcgtgccactggcgtttacgggtagcgctgccccggctatcccccagcgcccggggatcgtgcgcgtacgtcttccagcggttcattttgtcaaccaagctttctatcccgttgttggggaaattcttctccctctcgggtctcaacagggagtcgttcaaatactcctcctcgccgatcaagcgaggacgggttattcttcccagctcactgctgcgtacactgtttagcgaaaatggcaaactagggaaaggacttgcggcctcgggagccgctgcggcagcacccgttgccccggacagtgacacggaagagtgccttctatcgccaccttccttcttccaagtgttataaccaggaggcggggagaaaacactactgtccacatcgtcccataaaaacccgtcattgggtcgggcaatgtcatactcgcccgtatagaacccaggtgggggcagccaatgggggttcaggatagcattggtgaaataatcagagttcatagcagccgccctgtgtaagtagtctagcagtttattgataaaaggccggttactggcatacatgctgggctccatgtttcgggctgtcatatcgagcgcagcagtaggagtcgccccctcctgcattaggaacagtcccacgctctgctgcacgtatctcaggatccgttcctcctccgcggtaagcgcatactgaggagggatcttctgcgaccggttggtcagcaagaagtttaaggtggcttccaagctgccagtgtcctcccgacccagagcgcggctcacttgggtaatttcttgataggtttgctcatctacctgagtttgccctatggcctcgcgatacaggttcaacagatagcccaagtacgaattacggtcgatgctaccgctgtcagtgaatggggctaccaagagcagtagtaggcgggagttgggggtcagcaagctagacacggtcgcccgatctcccactggggcgcgcactccccacagaccattcaggttcttaaaagcctggctcaggttcactgtctgcaagccctgtctgctggtctggaaaaagtagtctggcccggactggtacacttcgctttgagggacttcggccaccatgagtctcaatgcacttagaaagtttgtgtagtcttgctgaccgcgaggcacgttggcaggctgagtgctgaggaaggcgttcaaagccaccagcgaccctaaattggcgtctcgctggaaccgctcgcgctgagacacggcctcgcgcacatcggtcaccatccggtccaggttggtctgcacgttgctgctgttgtagcgggctacgcgctccaatagggcattgtataccagcccagcctcatcgggacgtatggctttgttctccaccagcgcgttcacgatggccaggaccttctcgtgtgtggggttggagcgggagggcactacggcctccaggatagcagaaaggcggttggcctggggttgctgcctaaaggcttcggggttgcgggtcgtcagcgccatgatgcgttgcatggcctggctccaatcgtccgaggagttaatgccggacggctggctctgtagcgccgcccgttttgcggggtccggtgcctgctgttccatctagcaaaaatatggatggtcgcgccatcagtcttccaggtactcgccctcctcatcctggccttcatccacctcttctatgtaaggaagctcataccctgctgcgtccagggccctgcgactgggctgccattgcaagtccgctcccatgtcaaagtagttctccccctcggttccagccccagtcagagctctttgcaagctgtgcataagttctctgtcgctcagctcacgccttctgctggcgctcactgcgcggtgcatcctgtcgttgcggtacactcccagatcgtcactcaaggtcagcaccttgagagtcatgcgcatataaaacccatctatcttcacctccttgtctataggtacgtatggggttttgtagatcttgcgagcgtagtgcttgcccaggctcaagaccgagtagttaatagcagccaccttctcagctagacccaggctacgttcttgcactattatactttgcagaatattgataagatcatacaaccatctcccctcgggctcagtaatgttcaacagcgcctccctaaatgcctcattgtctctactatgttgcaccaccagaaacagctgagcggttagaggtttgctggtggggttctgggtaatggcttccatcaggtcccacaggtgcatcagtcccagtgtcacttcctcgcgggcaatcagggtgcgcacatggttgttgaaagatttttgaaagttgcgctcctccttcacggtctgctcgtaagctgatactaggttggccgcggccacatgtgccctagcaggacttattcctgtcacttcatcgacttcaaaatcatcatcacgcagcacccgtcttcggtccagaccgtgacgcagttcgcgacccgcgttaaagcgggaagctcgcatttcctcaggctcctcgccgctcctgtccctgaacaggttctgctggggcacgtacgcctcgcgagagtcctttttcagttgcacccgcgggtgccgctcgggcgatggtgcgcccaggcgcgccagtccctcgccctcttccaagtccagatcataggcgggctgccccgcgccgctgacggctgcagccgcagtagttacaggagcaggaagagccttttgtggctgttgttgtagctgctgctgagaagggggctgttgctgggggcgcatctgtcgcagcacgggatgcatctgggcaacaaaaaaacaaaaaaagagggctcgctcccgtaaactggagaagtcggctggcggggtcttagaaatgacggggctgccaaaccctcgcttgtcgcggaaaccggccgatccggcgcgctaagactcgaaccggggcacaccgcaacgcaaccctggcgattgattctccagactacgggcgcgagccactcccagccccgagaactgagtgttctaaagcttgacgcagcactggctcccatccaggaaaaagcaaaaaaaaaaaaaaacgacccgcctccgtatcctggaggttttgtgcaggcctgggtcgagacgggagtgccagtaccacgttagctgcggctccagcctgatccgagattcgaaccggggtacacgcgcagcccaacccgttcgcttagcctccaggccacggagacgagccgctgaccgctttcgtttttgcccgtatgtctagagcatcaacgactgtgcacgtctcacgggccaaaccgtgcctaccatgaactacttcatgccgctgcgcaacatctggaaccgcgtacgcgagttcccgcgggcatccaccaccgcctccggtatcacctggatgtccaggtacatctacggttatcaccgcctcatgctggaagacctcgcccctggcgccccggctacagagcgatggcccctataccgccagccgccgccgcactttcttatcggctaccagtacctggtgcgcacctgtaacgattacatctttgacacccgcgcctactcgcgcctcaagtacaccgagattgtgcgtccggggcaccagacagtcaactggtcagtcatggccaactgctcctacacaatcaacaccggggcttaccaccgcttcgtggactttgacgacttccaagccaccctcacccaggtgcagcaagccatcctcgcagaaagggttgtagcggacctggcacttgtccagcccatgcgcgggttcgggatcactcgcatgcatggcagagcgggcgaagaagaagtgcccgtggaacgactcatgcaagactactataaagatctggccagatgtcaggataatgcttggggaatggcccatcgcctgcgcatccaacaagccggacccaaagacctggtgctcctcgccaccatccgccgtctcaaaactgcctattttaatttcatcaccagcagcatcgtctcaccctccaaagaggaggaaggagaagaaagagagaaccccgaccgagcgtctagccgcccccgcccgcaagaaacagtgctcagcctaccttgcgattgcgactggttagacgctttcgtcgaaaggttttcagatcccgtggatcttgagacgatcaggtccttgcgcggagtacctacggggcaattgataaaatgcataatcagcgcggtgtccctgcccaacggagagcctcccagtcaccacttcagggagatgcgcggaggcgtcttcactctgagacccagggagaacggtcgtgccgtcaccgagaccatgcgccgccgccgcggagaggtcattgaaagattcatcgaccgtctgcccgtgcgccgccggcgtcgccgcgttccccctcctcctgcagccccacctgaagaggaagagatgttagtggaagaagaagagattgaggaagaaatcccaggggctttcgagcgcgaggtgcgcaccaccgtcgccgaactcatccgtcttctggaagaggagttgaccgtgtccgcgcgtaactcccagtttttcaactttgccgtggacttctacgaggccatggagcgcttggaagcgctgggcgatgtcagcgagatgccgctgagacgatggatcatgtatttcttcgtcaccgagcacatcgccaccacactcaactaccttttccagcgtctatgcaactatgcggtcttcacccgccacgtggagctcaacctcgcccaggtggtcatgcgcgcgagagatcccgtgggggctgtggtctacagccgcgtctggaacgaggcgggcatgaatgcattctctcaactcattgggcgcatctccaacgacctggcggccaccgtcgagagagcgggccgcggagatcttcaagaggaagagatcgagcagttcatggccgagatcgcctaccaggacaactctggcgacgtgcaagaaatccttaggcaagccgccgtcaacgataccgagattgattctgttgaactctctttcaggttcaagctcacggggccggtagctttcacccagaggcgtcagatccaggatgtcaaccgccgcgtcgtcgcgcatgcgagtcttctcagagcacagtaccagaacctacccgcgcgcggcgccgacgtaccactgccagccatgccgccgggtcccgaaccgcccctgccgcccggtgcgcgccctcgacaccgcttctaaacatgcaagaagcaacagagccaccgccgcccaaaaggaaaaacaagggcacggtggtagcacccaaggggcacggaaccctgcaagccatcgacatctccaccaacggacccgtggagatcaagtaccatctgaacctccctcacgccctcgaaaagatcatgcaagtcaatctcctgacactgcctactaacctgactccgcagcgtctcaggaccctggacagctccggcctgcgcgctctcgtcctcgagctccgcccctgccgcgccgaggtctggacttgcctcccgcgagggctcgtcagcatgaccaccatcgagacagaagatggtcatgccgatgcagacaacatagtagagcgcgaggtacaaacgccaggcctcaattttccactgaaatttctcgtcaaaggaagtcaggtacaactcattcatgaggtgcatcccgtgaatcgctgcgagtactgcggccgtctgtacaagcacaagcatgaatgctcggcgcgtcgcagggagttctacttccatcacatcaacagccattcctccaactggtggcaggagatccagttcttcccgattggctctcatcctcgcacagaaaggctcttcctcacctacgatgtggaaacctacacctggatggggtcctttggcaagcagctaatccccttcatgctggtcatgaaactctctggagaccagcggctcgtcaacatcgcctatgacctcgccatgaaactcaagtgggatcgctggcggcaggacccccaaaccttctattgcgtcaccccagaaaagatggcagtcgggcagcattttcgtcagtaccgggaccagttacaaacagcactggcagtggacctctggtcctccttcctcaaagcgaaccctcacgtgcacgaatgggccctcgaacactatgctctcactgaccctacagatctcacttttgaagaactcaagaagctgcctcatgtcaggggcacccctcgattcttagaactgtacatagtggggcacaacatcaatggctttgatgagatcgtcttggccgctcaggttatcaataaccgagcagaggtccctcagcctttcaaaatcacccgaaatttcatgcccagggccggcaagatcctcttcaatgatgttactttcgctttgcccaaccccgcctacaagaagcgggtggacttccaactctgggaacagggggcctgtgatgacattgacttcaagtatcaattcctcaaagtcatggtcagggacacttttgccctcactcatacctcgctgcgcaatgcagcccaagcatactctcttccagtggagaagggatgctgtccctacaaggcagtcaatcagttctacatgttgggctcttaccgtgcagaaaaagacgggtttcccctcgaagagtactggaaggatcgcgaagaataccttctcaaccgcgagctgtgggaaaagaaaagccaaccgcgttatgacatcatccaggaaactctcgactactgtgccctggatgtactcgtcaccgccgagctggtagccaagctgcaagagtcatatgcccacttcataagggactctgtaggcctacctcatgcccattttaacatattccagagacctactatctcttccaattcccatgccatctttcgccagatcgtttacagggcggaaaaacccaaccgcaccaatctgggcccgggtcttctcgccccctcacatgaactctatgactatgtgcgagcaagcatcagaggggggcgctgttatcccacttacatcggcatcctcgaagagcccctctatgtctacgatatctgtggcatgtatgcctccgcgctcacccaccccatgccctggggcacccctcttaacccctatgagcgcgcgctggcagttcgagaatggcagatgaccttggatgatcccgccaccatcagctattttgacaaagatttgctaccgggaatatttaccatagatgcggacccccctgatgagttcatgctagaccccctcccacctttctgttcaagaaaaggaggtcgactctgctggaccaatgagcccctccgaggcgaggtggccaccagtgtggatctgataaccctgcacaataggggatggcgagtcagaatagttccggatgaactgacaaccatcttccctgaatggaaatgtgtggcgcgcgagtacgtccagcttaacatcgccgccaaggagcgcgcggacaaggaaaagaaccaaaccatgcgctccatcgccaagcttctgtccaatgccctttatggatcatttgccaccaagctggacaacaagaagattgtgttttctgaccagatggacgagagtcttatgaaaggcgtctctgctggtactgtcaatatcaaatcctcctcgttcctagaaactgacaacctgagtgcagaggtcatgcccgccttcgagagggaatacctaccccaacagctggcgctcctggacagcgatcctgaagacagtgaggacgaacagaggcccgcccccttttatacccccccggcggggacccctggtcacgtggcctacacttacaagccaatcacattcttggatgtggaggagggggacatgtgtttacataccgtagagaaggtggacccactggttgacaacgaccgctacccctcccacgtggcctcctttgtgctggcctggacacgcgcttttgtatcagagtgggctgggttcctctacgaagaggaccgaggcactccgctcgaggacaggcccataaagtcggtctacggggacacggacagcctctttgtcacccagcggggacacgaactcatggaaaccaaaggtaagaaacgcatcaaaaaacatggcggaaaacttgtttttgaccccgatgagccggatctgacctggctcgtggagtgcgaaaccgtctgcgcctcctgcggtgcggatgcatactcccccgaatccattttcctcgcgcccaagctgtatgccctcaaatgtatctactgccccgcctgccataaaacttccaaaggtaagctccgtgccaaaggccacgcggccgaggcgctcaactacgaactcatggtaaactgctacctggccgacctgcagggcgccgatcggcagcggttctcgaccagcaggatgagtctgaagcgcaccctcgcaagcgcccaaccaggcgcgcaccccttcaccgtgacggaaacaaccctgactcggacgctgcgaccatggaaggatcggaccctagcagcgctggacgcccatcgtctgattccctactccaggagccgtcccaacccgcgaaacgaggaggtctgttggatcgagatgccatagagcacatcaccgagctctgggaccggctcgagctcttgcaacagactctttccaaaatgcccatggctgacgggctgaagccgctgaaaaacttctcctcgctccaggagcttctatcccttgggggagagcgcctcctaacggacttggtgcgggaaaatatccatgtaagggaaatgatgaacgaagtggcccccctgctccgggaggacggcagctgtcgctccctaaactaccatctgcaacccgtaattggggtcatttacggtcccactgggtgcggcaagtctcagctgcttaggaatttgctctcatcccagttaatcaccccggctccagaaacggtattttttatagccccgcaggtggacatgatccccccctcggaactgaaagcctgggaaatgcaaatatgtgagggaaactatgctcccgggccagagggaactttcatcccccaatctggcaccctccgcccaaagtttattaaaatggcttatgatgacctgactcaggagcataactatgatgtttcagacccccggaacgtgttcgcccgtgccgctgcccacggccccatcgctatcattatggatgagtgcatggagaatctggggggtcacaaaggcgtctccaaattttttcatgcttttccctctaagctgcatgataaatttcccaagtgcaccggatacactgtcttggtggttctgcacaatatgaatccgagacgggatctaggcggcaacattgccaacctcaagatccagtccaaaatgcatataatttcacccaggatgcacccgtcccagctcaacagatttgtaaacacctacactaagggcctccccgttgcaattagtctgctcctaaaagatattgtgcaacaccatgcactccgaccttgctatgactgggtgatttataacactaccccggagcaagaggctcttcaatggagctatctccacccccgagacggactaatgcccatgtatctaaacattcaatcccacctttacagggtactggaaaagatccaccgagttctcaatgatcgagaccgatggtccagggcataccgcgcgcgaaaaatcaaataaacattcatttgtttttataaca

SEQ ID NO: 196 - DNA, 3768 bp, Human adenovirus
  misc_feature 1..3768: note = Human adenovirus 21, Ad21 E3
  source 1..3768: mol_type = genomic DNA
atgtctaatggtggcgcggctgagctagctcgactgcgacacctagaccactgccgccgctttcgctgtttcgcccgggaactcaccgagttcatttacttcgaactctccgaggagcaccctcagggtccggcccacggagtgcggattaccatcgaagggggaatagactctcgcctgcatcgcatcttctcccagcggcccgtgctgattgagcgcgaccagggaaatacaaccatctccatctactgcatctgtaaccaccccggattgcatgaaagcctttgctgtcttgtttgtgctgagtttaataaaaactgagttaagaccctcctacggactaccgcttcttcaatcaggactttacaacaccaaccagatcttccagaagacccagacccttcctcctctgatccaggactctaactctaccttaccagcaccctccactactaaccttcccgaaactaacaagcttggatctcatctgcaacaccgcctttcacgaagccttctttctgccaatactaccactcccaaaaccggaggtgagctccgcggtcttcctactgacgacccctgggtggtagcgggttttgtaacgttaggattagttgcgggtgggcttgtgctaatcctttgctacctatacacaccttgctgtgcatatttagtcatattgtgctgttggtttaagaaatgggggccatactagtcgtgcttgctttactttcgcttttgggtctgggctctgctaatctcaatcctcttgatcacgatccatgtctagacttcgacccagaaaattgcacacttacttttgcacccgacacaagccgtctctgtggagttcttattaagtgcggatgggactgcaggtccgttgaaattacacataataacaaaacatggaacaatacattatccaccacatgggaaccaggagttcccgagtggtatactgtctctgtccgaggtcctgacggttccattcgcattagtaacaacactttcattttttctgaaatgtgcgatctggccatgtttatgagcaaacagtatgacctatggcctcctagcaaagagaacattgtggcattttccattgcttattgcttggtaacatgcatcatcactgctatcatttgtgtgtgcatacacttgcttatagttattcgccctagacaaagcaatgaggaaaaagagaaaatgccttaacctttttcctcataccttttctttacagcatggcttctgttacagctctaattattgccagcattgtcactgtcgctcacgggcaaacaattgtccatattaccttaggacataatcacactcttgtagggcccccaattacttcagaggttatttggaccaaacttggaagtgttgattattttgatataatttgcaacaaaactgaaccaatatttgtaatctgtaacagacaaaatctcacgttaattaatgttagcaaaatttataacggttactattatggttatgatagatccagtagtcaatataaaaattacttagttcgcataactcagcccaaatcaacagtgccaactatgacaataattaaaatggctaataaagcattagaaaattttacattaccaacaacgcccaatgaaaaaaacattccaaattcaatgattgcaattattgcggcggtggcattgggaatggcactaataataatatgcatgttcctatatgcttgttgctataaaaagtttcaacataaacaggatccactactaaattttaacatttaattttttatacagatgatttccactacaatttttatcattactagccttgcagctgtaacttatggccgttcacacctaactgtacctgttggctcaacatgtacactacaaggaccccaagaaggctatgtcacttggtggagaatatatgataatggagggttcgctagaccatgtgatcagcctggtacaaaattttcatgcaacggaagagacttgaccattattaacataacattaaatgagcaaggcttctattatggaaccaactataaaaatagtttagattacaacattattgtagtgccagccaccacttctgctccccgcaaatccactttctctagcagcagtgccaaagcaagcacaattcctaaaacagcttctgctatgttaaagcttcgaaaaatcgctttaagtaattccacagcagctcccaatacaattcctaaatcaacaattggcatcattactgccgtggtagtgggattaatgattatatttttgtgcataatgtactacgcctgctgctatagaaaacatgaacaaaaaggtgatgcattactaaattttgatattgtttcaatcaaatgccactaacactctcaatgtgcagactactttaaaacatgacatggaaaaccacactacctcctatgcatacacaaatattcagcctaaatacgctatgcaacttagaaatcaccatactaattgtaattggaattcttacactatctgttattctttattttatattctgccgtcaaatacccaatgttcatagaaattctaaaagacgtcccatctattctcctatgattagtcgtccccatatggctctgaatgaaatctaagatctttttttttcttttacagtatggtgaacatcaatcatgattcctagaaatttcttcttcaccatactcatctgtgctttcaatgtctgtgctactttcacagcagtagccactgcaagcccagactgtataggaccatttgcttcctatgcactttttgcctttgttacttgcatctgcgtgtgtagcatagtctgcctggttattaattttttccaactggtagactggatctttgtgcgaattgcctacctacgtcaccatcccgaataccgcaatcaaaatgttgcggcacttcttaggcttatttaaaaccatgcaggctatgctaccagttattttaattctgctactaccctgcattgccctaccttccaccgccactcgcgctacacctgaacaacttagaaaatgcaaatttcaacaaccatggtcatttcttgattgctaccatgaaaaatctgattttcccacatactggatagtgattgttggaataattaacatactttcatgtaccgttttctcaatcacaatataccccacatttaattttgggtggaattctcccaatgcactgggttacccacaagaactagatgaacatatcccactacaacacatacaacaaccactagcattggtagagtatgaaaatgagccacaaccttcactgcctcctgctattagttacttcaacctaaccggcggagatgactgaaatactcaccacctccaattccgccgaggatctgcttgatatggacggccgcgcctcagaacagcgactcgcccaactacgcatccgccagcagcaggaacgcgtgaccaaagagctcagagatgtcatccaaattcaccaatgcaaaaaaggcatattttgtttggtaaaacaagccaagatatcctacgagatcaccgctactgaccatcgcctttcttacgaacttggcccccaacgacaaaaatttacatgcatggtgggaatcaaccctatagttatcacccagcaaagtggagatactaagggttgcattcactgctcttgcgattccaccgagtgcacctacaccctgctgaagaccctatgcggcctaagagacctgctacccatgaattaa

SEQ ID NO: 197 - DNA, 972 bp, Human adenovirus
  misc_feature 1..972: note = Human adenovirus 21, Ad21 fiber
  source 1..972: mol_type = genomic DNA
atgaccaagagagtccggctcagtgattccttcaaccctgtctacccctatgaagatgaaagcacctcccaacacccctttataaacccagggtttatttccccaaatggctttacacaaagcccagacggagttcttactttaaattgtttaaccccactaacaaccacaggcgggcctttacagttaaaagtgggagggggacttatagtggatgacactgatgggaccttacaagaaaacatacgtgctacagcacccattactaaaaataatcattctgtagaactatccattggaaatggattagaaacacaaaacaataaactatgtgccaaattgggaaatgggttaaaatttaacaacggtgacatttgtataaaggatagtattaacaccttatggactggaataaagcctccacctaactgtcaaattgtggaaaacactgatacaaacgatggcaaacttactttagtattagtaaaaaacggagggcttgttaatggctacgtatctctagttggtgtatcagacactgtgaaccaaatgttcacacaaaagtcagcaaccatacaattaagattatatttcgactcttctggaaatctattaactgatgaatcaaacttaaaaattccacttaaaaataaatcttctacagcaaccagtgaagctgcaaccagcagcaaagcctttatgccaagtactacagcttatccctttaacaccactactagggatagtgaaaactatattcatggaatatgttactatatgactagttatgatagaagtctagttcccttaaacatttctataatgctaaacagccgtacgatttcttccaatgttgcctatgccatacaatttgaatggaatctaaatgcaaaagaatctccagaaagcaacatagctacgctgaccacatccccctttttcttttcttatattagagaagacgacaactaa

SEQ ID NO: 198 - DNA, 126 bp, Human adenovirus
  misc_feature 1..126: note = Human adenovirus 21, Ad21 fiber tail
  source 1..126: mol_type = genomic DNA
atgaccaagagagtccggctcagtgattccttcaaccctgtctacccctatgaagatgaaagcacctcccaacacccctttataaacccagggtttatttccccaaatggctttacacaaagccca

SEQ ID NO: 199 - DNA, 273 bp, Human adenovirus
  misc_feature 1..273: note = Human adenovirus 21, Ad21 fiber shaft
  source 1..273: mol_type = genomic DNA
gacggagttcttactttaaattgtttaaccccactaacaaccacaggcgggcctttacagttaaaagtgggagggggacttatagtggatgacactgatgggaccttacaagaaaacatacgtgctacagcacccattactaaaaataatcattctgtagaactatccattggaaatggattagaaacacaaaacaataaactatgtgccaaattgggaaatgggttaaaatttaacaacggtgacatttgtataaaggatagtattaacacc

SEQ ID NO: 200 - DNA, 570 bp, Human adenovirus
  misc_feature 1..570: note = Human adenovirus 21, Ad21 fiber knob
  source 1..570: mol_type = genomic DNA
ttatggactggaataaagcctccacctaactgtcaaattgtggaaaacactgatacaaacgatggcaaacttactttagtattagtaaaaaacggagggcttgttaatggctacgtatctctagttggtgtatcagacactgtgaaccaaatgttcacacaaaagtcagcaaccatacaattaagattatatttcgactcttctggaaatctattaactgatgaatcaaacttaaaaattccacttaaaaataaatcttctacagcaaccagtgaagctgcaaccagcagcaaagcctttatgccaagtactacagcttatccctttaacaccactactagggatagtgaaaactatattcatggaatatgttactatatgactagttatgatagaagtctagttcccttaaacatttctataatgctaaacagccgtacgatttcttccaatgttgcctatgccatacaatttgaatggaatctaaatgcaaaagaatctccagaaagcaacatagctacgctgaccacatccccctttttcttttcttatattagagaagacgacaac

SEQ ID NO: 201 - DNA, 1686 bp, Human adenovirus
  misc_feature 1..1686: note = Human adenovirus 21, Ad21 penton
  source 1..1686: mol_type = genomic DNA
atgatgaggcgaaccgtgctaggcggagcggtggtgtatccggagggtcctcctccttcgtacgagagcgtgatgcagcaggcggcggcggcgacgatgcagccaccactggaggctccctttgtaccccctcggtacctggcacctacggaggggagaaacagcattcgttactcggagctggcaccattgtatgataccacccggttgtatttggtggacaacaagtccgcggacatcgcctcactgaactatcagaacgaccacagcaacttcctcaccacggtggtgcaaaacaatgactttacccccacggaggccagcacccagaccatcaactttgacgagcggtcgcgatggggcggtcagctgaagactatcatgcacaccaacatgcccaacgtgaacgagtacatgtttagcaacaagttcaaagctcgggtgatggtgtctagaaaggctcctgaaggtgtcacagtagatgacaattatgatcacaagcaggatattttggaatatgagtggtttgagtttactctaccggaagggaatttctcagccacaatgaccattgacctaatgaacaatgccatcattgataattaccttgaagtgggcagacagaatggagtgttagagagtgacattggtgttaaatttgacaccaggaactttagactgggttgggatccggaaactaagttgattatgcctggggtttacacctatgaggcattccatcctgacattgtattgttgcctggttgcggagttgactttactgaaagtcgccttagtaacttgcttggtatcaggaaaagacacccattccaggagggttttaagatcttgtatgaggatcttgaagggggtaatatcccggccctgttggatgtagaagcctatgagaacagtaagaaagaacaagaagccaaaacagaagccgctaaagctgctgctattgctaaagccaacatagttgtcagcgaccctgtaagggtggctaatgcagaagaagtcagaggagacaactatacagcttcatctgttgcaactgacgaatcgctattggctgctgtggccgaaactacagagacaaaactcactattaaacctgtagaaaaagacagcaagagtagaagttacaatgtcttggaagataaagtgaatacagcctaccgcagctggtacctgtcctacaactatggtgaccctgaaaaaggagtccgttcctggacactgctcaccacctcggatgtcacctgtggagcagagcaggtgtactggtcgctcccagacatgatgcaggaccctgtcacattccgttccacgagacaagtcagcaactatccagtggtaggtgcagagctcatgccggtcttctcaaagagtttctacaacgagcaagccgtgtactcccagcagcttcgccagtccacctcgctcacgcacgtcttcaaccgcttccctgagaaccagatcctcatccgcccgccagcgcccaccattaccaccgtcagtgaaaacgttcctgctctcacagatcacgggaccctgccgttgcgcagcagtatccggggagtccagcgcgtgaccgttactgacgccagacgccgcacctgcccctacgtctacaaggccctgggcatagtcgcgccgcgcgtcctttcaagccgcactttctaa

SEQ ID NO: 202 - DNA, 2850 bp, Human adenovirus
  misc_feature 1..2850: note = Human adenovirus 21, Ad21 hexon
  source 1..2850: mol_type = genomic DNA
atggccaccccatcgatgctgccccagtgggcatacatgcacatcgccggacaggatgcttcggagtacctgagtccgggtctggtgcagttcgcccgcgccacagacacctacttcaatctggggaacaagtttaggaaccccaccgtggcgcccacccatgatgtgaccaccgaccgcagtcagcggctgatgctgcgctttgtgcccgttgaccgggaagacaatacctacgcatacaaagttcgatacaccttggctgtgggcgacaacagagtgctggatatggccagcactttctttgacattcggggtgtgttggatagaggccctagcttcaagccatactctggcactgcttacaactcgttggcccctaagggcgctcccaatacatctcagtggattgctgaaggcgtaaaaaaagaagatgggggatctgacgaagaggaagagaaaaatctcaccacttacacttttggaaatgccccagtgaaagcagaaggtggtgatatcactaaagacaaaggtcttccaattggttcagaaattacagacggcgaagccaaaccaatttatgcagataaactataccaaccagaacctcaggtgggagatgaaacttggactgacacagatggaacaactgagaagtatggtggtagagctctaaagccagaaactaaaatgaaaccctgctatgggtcttttgctaaacccactaacgtcaaaggcggacaggcaaaacaaaaaactactgaacaaccgcaaaaccagcaggttgaatatgatattgacatgaacttttttgatgaagcgtcacagaaagcaaacttcagtccaaaaattgtgatgtatgcagaaaatgtagacttggaaaccccagacactcatgtggtgtacaaacctggtacttcagaagaaagttctcatgctaatctgggtcaacaatctatgcccaacagacccaactacattggctttagagataactttattggacttatgtactacaacagtactggcaacatgggagtgctggcaggtcaagcatcccaattgaatgcggtggttgacttgcaggacagaaacacagaactatcatatcaactactgcttgactctctgggtgacagaaccagatacttcagcatgtggaatcaagcagtcgatagctatgatcctgatgtgcgcattattgaaaatcatggggtggaagatgagcttcccaactactgctttccattggatggagtaggggtaccaataagtagttacaaaataattgaaccaaacggacagggtgcagattggaaagagcctgacataaatggaacaagtgaaattggacaaggaaatctctttgccatggaaattaacctccaagctaatctctggagaagttttctttattccaatgtggctctgtatctcccagactcctacaaatacaccccagccaatgtcactcttccaactaacaccaacacttatgactacatgaatgggcgggtggttcccccatccctggtggatacctacgtaaacattggcgccagatggtctttggatgccatggacaatgtcaacccctttaaccatcaccgcaacgctggcctgcgataccggtccatgcttttgggcaatggtcgttacgtgcctttccacattcaagtgcctcagaaattctttgctgtgaagaacctgctgcttctacccggttcttacacctacgagtggaacttcagaaaggatgtgaacatggtcctgcagagttcccttggtaatgatctccgggtcgatggtgccagcataagttttaccagcatcaatctctatgccaccttcttccccatggcccacaacactgcctccacccttgaagccatgctgcgcaatgacaccaatgatcaatcattcaatgactacctttctgctgccaacatgctctaccccatcccggccaacgctaccaacgttcccatctccattccctctcgcaactgggccgccttcagaggctggtccttcaccagactcaaaaccaaggagactccctctttgggatcagggttcgatccctactttgtttactctggttctataccctacctggatggtaccttctaccttaaccacactttcaagaaagtctccatcatgtttgactcttcagtgagctggcctggtaatgacagattgctaagtccaaatgagttcgaaatcaagcgcacagttgatggggaaggctacaatgtggcccaatgtaacatgaccaaagactggttcctggtccagatgcttgccaactacaacattggataccagggcttctacgttcctgagggttacaaggatcgcatgtactccttcttcagaaacttccagcccatgagtagacaggtggttgatgagattaactacaaagactataaagctgtcgccgtaccctaccagcataataactctggctttgtgggttacatggctcctaccatgcgtcagggtcaagcgtaccctgctaactacccataccccctaattggaaccactgcagtaaccagtgtcacccagaaaaaattcctgtgcgacaggaccatgtggcgcatcccattctctagcaacttcatgtccatgggtgcccttacagacctgggacagaacttgctgtatgccaactcggcccatgcgctggacatgacttttgaggtggatcccatggatgagcccaccctgctttatcttcttttcgaagtcttcgacgtggtcagagtgcaccagccacaccgcggcgtcatcgaggccgtctacctgcgcacaccgttctcggccggcaacgccaccacataa

SEQ ID NO: 203 - protein, 323 aa, Human adenovirus; identical to SEQ ID NO: 76
  REGION 1..323: note = misc_feature - Human adenovirus 21, Ad21 fiber

SEQ ID NO: 204 - protein, 91 aa, Human adenovirus
  REGION 1..91: note = misc_feature - Human adenovirus 21, Ad21 fiber shaft
DGVLTLNCLTPLTTTGGPLQLKVGGGLIVDDTDGTLQENIRATAPITKNNHSVELSIGNGLETQNNKLCAKLGNGLKFNNGDICIKDSINT

SEQ ID NO: 205 - protein, 190 aa, Human adenovirus
  REGION 1..190: note = misc_feature - Human adenovirus 21, Ad21 fiber knob
LWTGIKPPPNCQIVENTDTNDGKLTLVLVKNGGLVNGYVSLVGVSDTVNQMFTQKSATIQLRLYFDSSGNLLTDESNLKIPLKNKSSTATSEAATSSKAFMPSTTAYPFNTTTRDSENYIHGICYYMTSYDRSLVPLNISIMLNSRTISSNVAYAIQFEWNLNAKESPESNIATLTTSPFFFSYIREDDN

SEQ ID NO: 206 - protein, 561 aa, Human adenovirus; identical to SEQ ID NO: 77
  REGION 1..561: note = misc_feature - Human adenovirus 21, Ad21 penton

SEQ ID NO: 207 - protein, 949 aa, Human adenovirus; identical to SEQ ID NO: 78
  REGION 1..949: note = misc_feature - Human adenovirus 21, Ad21 hexon

SEQ ID NO: 208 - protein, 42 aa, Human adenovirus; identical to SEQ ID NO: 136
  REGION 1..42: note = misc_feature - Human adenovirus 21, Ad21 fiber tail

SEQ ID NO: 209 - DNA, 137 bp, Human adenovirus
  misc_feature 1..137: note = Human adenovirus 34, Ad34 5? (left) ITR
  source 1..137: mol_type = genomic DNA
catcatcaataatataccttatagatggaatggtgccaatatgtaaatgaggtgattttaaaaattgtggggtgtgtggtgattggctgtggggttaacggctaaacggggcggcgcggccgtgggaaaatgacgtt

SEQ ID NO: 210 - DNA, 137 bp, Human adenovirus
  misc_feature 1..137: note = Human adenovirus 34, Ad34 3? (right) ITR
  source 1..137: mol_type = genomic DNA
aacgtcattttcccacggccgcgccgccccgtttagccgttaaccccacagccaatcaccacacaccccacaatttttaaaatcacctcatttacatattggcaccattccatctataaggtatattattgatgatg

SEQ ID NO: 211 - DNA, 342 bp, Human adenovirus
  misc_feature 1..342: note = Human adenovirus 34, Ad34 Packaging Sequence
  source 1..342: mol_type = genomic DNA
ttgtgggggtggagtttttttgcaagttgtcgcgggaaatgtgacgcataaaaaggctttttttctcacggaactactgacttttcccacggtatttaacaggaaatgaggtagttttgaccggatgcaagtgaaaattgctgatttgcgcgcgaaaactgaatgaggaagtgtttttctgaataatgtggtatttatggcagggtggagtatttgttcagggccaggtagactttgacccattacgtggaggtttcgattaccgtgttttttacctgaatttccgcgtaccgtgtcaaagtcttctgtttttacgtaggtgtcagctgatcgctacggtat

SEQ ID NO: 212 - DNA, 3450 bp, Human adenovirus
  misc_feature 1..3450: note = Human adenovirus 34, Ad34 E1
  source 1..3450: mol_type = genomic DNA
ttatacctcagggtttgtgtcaagaggccactcttgagtgccagcgagaagagttttctcctctgcgccggcagtttaataataaaaaaatgagagatttgcgatttctgcctcaggaaataatttctgctgagactggaaatgaaatactggagcttgtggtgcacgccctgatgggagacgatccggagccacctgtgcagctttttgagcctcctacgcttcaggaactgtatgatttagaggtagagggatcggaggattctaatgaggaagctgtgaatggcttttttaccgattctatgcttttagctgctaatgaaggattagaattagatccgcctttggacactttcgatactccaggggtgattgtggaaagcggtacaggtgtaagaaaattacctgatttgggttccgtggactgtgatttgcactgctatgaagacgggtttcctccgagtgatgaggaggaccatgaaaaggagcagtctatgcagactgcagcgggtgagggagtgaaggctgccagtgttggttttcagttggattgcccggagcttcctggacatggctgtaagtcttgtgaatttcacaggaaaaatactggagtaaaggaactgttatgttcgctttgttatatgagagcgcactgccactttatttacagtaagtgtgtttaagttaaaatttaaaggaatatgctgtttttcacatgtatattgagtgggagttttgtgcttcttattataggtcctgtgtctgatgctgatgagtcaccatctcctgattctactacctcacctcctgagattcaagcacctgttcctgtggacgtgcgcaagcccattcctgtgaagcttaagcctgggaaacgtccagcagtggaaaaacttgaggacttgttacagggtggggacggacctttggacttgagtacacggaaacggccaagacaataagtgttccatatccgtgtttacttaaggtgacgtcaatatttgtgtgagagtgcaatgtaataaaaatatgttaactgttcactggtttttattgctttttgggcggggactcaggtatataagtagaagcagacctgtatggttagctcataggagctggctttcatccatggaggtttgggccattttggaagaccttagaaagactaggcaactgttagaggacgcttcggacggagtctccggtttttggagattctggttcgctagtgaattagctagggtagtttttaggataaaacaggactataaagaagaatttgaaaagttgttggtagattgcccaggactttttgaagctcttaatttgggccatcaagttcactttaaagaaaaagttttatcagttttagacttttcaaccccaggtagaactgccgctgctgtggcttttcttacttttatattagataaatggatcccgcagactcatttcagcaggggatacgttttggatttcgtagccacagcattgtggagaacatggaaggttcgcaagatgaggacaatcttaggttactggccagtgcagcctttgggtgtagcgggaatcctgaggcatccaccggtcatgccagcggttctggaggaggaacagcaagaggacaacccgagagccggcctggaccctccagtggaggaggcggagtagctgacttgtctcctgaactgcaacgggtgcttactggatctacgtccactggacgggataggggcgttaagagggagagggcatctagtggtactgatgctagatctgagttggctttaagtttaatgagtcgcagacgtcctgaaaccatttggtggcatgaggtccagaaagagggaagggatgaagtttctgtattgcaggagaaatattcactggaacaggtgaaaacatgttggttggagcctgaggatgattgggaggtggccattaaaaattatgccaagatagctttgaggcctgataaacagtataagattactagacggattaatatccggaatgcttgttacatatctggaaatggggctgaggtggtaatagatactcaagacaaggcagttattagatgctgcatgatggatatgtggcctggagtagtcggtatggaagcagtaacttttgtaaatgttaagtttaggggagatggttataatggaatagtgtttatggccaataccaaacttatattgcatggttgtagcttttttggtttcaacaatacctgtgtagatgcctggggacaggttagtgtacggggatgtagtttctatgcgtgttggattgccacagctggcagaaccaagagtcaattgtctctgaagaaatgcatattccaaagatgtaacctgggcattctgaatgaaggcgaagcaagggtccgccactgcgcttctacagatactggatgttttattttaattaagggcaatgccagcgtaaagcataacatgatttgcggtgcttccgatgagaggccttatcaaatgctcacttgtgccggtgggcattgtaatatgctggctactgtgcatattgtttcccatcaacgcaaaaaatggcctgtttttgatcacaatgtgttgaccaagtgtaccatgcatgcaggtgggcgtagaggaatgtttatgccttaccagtgtaacatgaatcatgtgaaagtgttgttggaaccagatgccttttccagaatgagcctaacaggaatctttgacatgaacatgcaaatctggaagatcctgaggtatgatgatacgagatcgagggtgcgcgcatgcgaatgcggaggcaagcatgccaggttccagccggtgtgtgtagatgtgactgaagatctgagaccggatcatttggttattgcccgcactggagcagagttcggatccagtggagaagaaactgactaaggtgagtattgggaaaacttggggtggggttttcagatggacagattgagtaaaaatttgttttttctgtctttcagctgtcatgagtggaaacgcttcttttaaggggggagtcttcagcccttatctgacagggcgtctcccatcctgggcaggagttcgtcagaatgttatgggatctactgtggatggaagacccgtccaacccgccaattcttcaacgctgacctatgctactttaagttcttcacctttggacgcagctgcagccgccgccgccgcctctgttgccgctaacactgtgcttggaatgggttactatggaagtatcgtggctaattccacttcctctaataacccttctaccctgactcaggacaagttacttgtccttttggcccagctggaggctttgacccaacgtctgggtgaactttatcagcaggtggccgagttgcgagtacaaactgagtctgctgtcggcacggcaaagtctaaataaaaaaaaattccacaatcaatgaataaa

SEQ ID NO: 213 - DNA, 19455 bp, Human adenovirus
  misc_feature 1..19455: note = Human adenovirus 34, Ad34 E2
  source 1..19455: mol_type = genomic DNA
atggccagccgcgaaggaaatcagttaagcgaccgccacagggagcacacccccgaacgcggaaggggttctgccagtcatccgccttccaggtcggaccgcagcccttcgcaatcgcctccacctctgcccccgaagagaaacacctgtcgccgtgtggggtcaggttcttctaccgacagtcagttggtaatggtgagcgaaacgtcacaatcctccctgtctccggaacggagcgacagtcctcctcctccgatacccccgaaaaagaagccaaggaagaccaaacatgtccccatgcaagacatcagtcaagacagcgaagaagaaagagaagaggcgcaacttgtagcagtgggtttcagctacccgcccgtgcgcatcgttgagaaggatggcaaaagaagcattgagaagatcgccaaagatgaccctctggctaaaggagctgctgcctgcactgttaagaatccgattagcttgcccctggtgtctgcttgggagaaaggcatggaagtgatgtgtctgctgatggagaagtacaggctggataacgaacttagaacctcttttaaactaatgcctgagcagcacgaacaatacaagcgcatctgtcaccagtacgtgaacgaggagcaccgaggcatccagttaactttcactagtcacaagacactgagcacgatgatgggaagatttctgcagggaatgatacattctttttctcagatcgcccaccataattgggaatgtacaggctgtgcgttgtggcctcatggctgcaatgattatgagggcaagctgaagtgcttgcatggcaatattatgattcagaaggagcagattatcgagatggatgtggccagcgagaacggacaacgagccttgaaggagaatcccgagcgaaccaaaatcacccaaaaccgctggggcagaagtgtggtgcaaatagccaacaatgacgcccgctgctgtgtgaatgatgccggctgcgcagctaaccagttttcgagcaggtcctgcgggatgttttataccgagggtagtaaagcccagcaggctttcaagcaatatgatgctttcatgagagccgtgtatccaggaatcagacaggatcaggccaagatgatactgatccccctgcactgcgattgtaaccacaagcctaattgggtgcccgccatgggtaggcagacctgcaagatgaccccgttcagcattgccaatgctgaagatctggatgtgggcatgattgcagatcccaccgtgctggcaagcgtaagacatccgtcgctgatggtgtttcagtgctgcaatccggtgtaccgcaactctcgcgctcagagcactggtcctaattgtgatttcaagatttcggctcctgacctgctgggagctttgcagctgaccagaaagctgtggagtgacatcctgcccgatataccggttcccaagttggtgattcccgaattcaagtggcaacccaagtatcagttccgcaacgtatcactgcctgcgggtcattctgattctcgtcagaacccattcgacttgtaaataaataagtaatccagagcctcgatacatgtaaaaaataaagtgctgtttattgaacacgttgtttacatgaatcattattgcacatccatacggtcgaacgcagtggccctttcgatgtgtgtacgatgagagcgaaaataaggcgaatgggtattgagaaaatggtagagtgctttttgattgtcacacagggtgggctggactttaggagaatgaagcatgttgtttggcactccagttagcaatttcatggtggggtttccgtccatgggacggtcaggccagtgcacaaaggcatgaaggaacatgcagcagaaaagtccgcaggcggcagaacgggggccctgcacggtctgggtagatttttccagcgtaatacaccggtccttggtagcaagagcgctgcggcgcaggagaccctcatattcaaactggtaaatctgtttgagacgatcatccgagaatccaaaaggatcaaaaaggtagcaggtgttagaacgtgggttccaaccgaaagccaaccagtgctctccccccgtctcacgtccggccgtatttacaatggcacaggcgagcttatcgggggccatgaaccccgggaagcgcttatcaaaggttcccaaaaaatatggtccgcaacccaggtcttggacaatggctctgagctcttgctcgctggagccgttttgggatccgcaggccatggttgcagctgctgtttgcaagaagcaagaagcttcttacgtggtagcgttaccggccgagaacggtgtacgcaggtagactgcctcgatgatgccgcggtgtggctgatgcactctgaccacgtcgaaaacttcgaagagaagataaagcagggtgggctcatccatgggatccacctcaaaggtcatgtccagagcatgagctgagttggcatagagcatgttctgtcccaagtctgtaagggctcccatagacatgaagttgcttgagaacggtatgcgccacatggttctgtcacacaagaactttttctgcgtaacactatttacggcagttgttccaatgagtggatagggatagttagcgggatagggttgaccttgacgcatggtcggagccatgtaacccacaaagccagagttgttgtgttggtagggtatggcgacggccttgaagtctttgtaattgacctcatcaaccacctgcctgctcatgggctggaagtttctgaaaaatgaatacatgcgatctttgtatccttctggaatgtagaagccctgatagccgatgttgtagttggcgagcatctgtaccaagaaccagtctttggtcatgttgcattgggctacgttgtagccttcgccatccacagtgcgctttatttcaaattcgttaggagatagtaacctgtcatttccaggccagctcactgaagagtcaaacatgatggaaaccttcttaaaagtgtggttcaggtagaaggtaccatccaggtagggaatagaaccagaatagacgaagtaggggtcaaatccagaccccaaagagggagtttctttggttttcagtctggtaaatgaccagcctctgaaagccgcccagttgcgagaaggaatggaaatgggaatattggttgcattggcaggaatggggtagagcatgttagctgcagataggtagtcgttgaatgactgatcattggtgtcattccgcagcatggcttcaagggtggaagcggtgttgtgagccatggggaaaaaagtagcatagaggttgatgctcgtaaaactgatgctggcgccatctacccgtaggtcgttaccgagggaactctgtagaaccatgtttacatccttcctaaagttccactcataagtgtaggagcctgggagaagcagcaggtttttaacagcgaagaatttttgaggcacttgtatgtggaaaggcacataacgtccgttacccagaagcatggatcggtaacgcaagccagcgttacggtggtggttgaatgggttgacattgtccatggcatccagagaccacctggcaccaatgttcacataggtgtctactagagatggcggcaccacccgcccgttcatgtagtcgtaggtgtttttgttttctggaagagtgacattggacggggtgtatttgtacgagtctgggagatatagagccacattggaataaaggaaacttcgccatagattggcttgaaggttaatttccatggcaaatggatttcccttagcaagttcactgctgccagttgggtctacatttgtccaagtagattggtctccatttggcttaatctccttgtaactatctgttcgcggaccgacaccatccaacggaaaacaatagttgggaagttcatcttccacaccatgattttcaataacacgtacatcaggatcataactgtccacagcctgattccacatgctaaagtatctggttctgtcgcccagagagtcaagcaagagttggtaagacagttctgtgtttctgtcctgcaagtcaaccactgcattcaactgagacgcttggccagccagtacccccatgttgccagtactgttatagtacataagtccgatgaagttatctctgaagccaatgtagttgggtctgttgggcatagactgttgtccaagattggtctcagaactagcatctgaaactccaggtttgtacacaacatgagtatctggacattccaggtccacattttctgcatacattacaattttaggtttgagttctgatctttgtgatcttaagtcaaagaagttcatgtcaatgtcatactcgatgttgttagtgccatcgtcttcttttggttttacctttgcctgacctcctttaatattagtaggtttagcaaaagatccgtagcagggtttcattttagtttcaggtttaagaaccctccctccatactcttcggtttttccgtctaggtcagtccaagtttcgtctcccacttgaggttctggctgataaagcttatcagcatagattggtttaggaccttcagttgaaacttccaagcccaccggcaatccgtcttttgtgatttcagcctcggcttttactggagcattaccaaaagtgtatgttgcttttttggcttcttccccatcatcagtattgccgtcgtccactaggccagtgcttgtaactcccttatccaaccactgagatgcatttggagcgcctttaggagccagggagttgtaagccgtaccagaatagggtttaaaactgggacctctgtccaacacgcccctaatgtcaaagaacgtgctggccatatccagcactctgttgtcgcccacggccagggtgtaccgcactttgtaagagtatgtattgtcctcccggtcaacgggcacgaagcgcaacatgagccgctggctacgatcggtggtcacatcgtgggtcggcgctacggtaggatttctaaacttatttcccagattgaagtaggtgtctgtggcgcgggcgaactgcaccagacccggactcaggtactccgaagcatcctgtccggcgatgtgcatgtatgcccattggggcagcatcgatggggtggccatcttgaaagtaactcagcgtcgacgcacgacctcttccttttttcctctgatgctgtgacggcgtgtaatgacacatatacacagataggcaagttaagcgctactccatatttaattaaaagcagcgacggcgttttacactttgcacgcctagacccacgatgctgttcagagtattttgccagtgtgcatttggacgaggagcgcccccgggacgtgacctggctacggcgactggtttcggggcagcgacaggcttagaagcgggtacagcagtagcagcaggaggagggggcaaatccaaggtgacgggtcgatgcaactgagaaggtttcatcaccccggtggccataggggctatcggtctagtggtgggcattccaagcttcgttgcttcctcataagaaggcggttcatctacgcgcgtcaccagcgtctcttccaaatcgggacgcggacgcttgtcgcctcgtttttctggcggaggaatttcttcctccacttgcatttcacctggggttgctggcggcgggtccaaacgactgtttatctttttctgcacagcctggttagccaaatctaccactccattgataccggaagctatcccatcgactactttttgttggaagttctggtctttaagtttatttctaagcgcctgtcctgtactgctgttccaagctttgttcccgtatgtttttatggttgagccaaaatttttaagcccgctccagatactgctccaattgaaggcgcccccgttcagttggctcgtgccgatgtcgctccaggtgcccatgtacggcttcgtgccgtgtcgcggagccaaggatgaaaaattgatgtcttccatctctaagaaaacatagtcacagtaccaggagtgtcagagtccattgtattttttatttatacgttttttttttttccaatgtcaatgtcgttgcgaggcctgaaccgccacggaagctatgcctggtattgcgccaatcgcagcagcgataattggaattaaggctggcaaaaaaccaccccgcaattgcttgcggatagcacgccgtcgcctgtagcgtcgcattccgcgccccaacatccctcttctacggcgcgagtttcttcctcggtaaccagtgatgggaacgcgaaggcgacaagtgagggccatatctgcaaggaggcagcggcaacattgattaagtgatgatactaggatggtaacgcgcacgcggcagtgtcaaaggttccgcactaccattgcggtacacttgccgcaccagggcgccgggaatcggtttgcttgtgcgtctacggcgacgactgcgatttgcaggtgtcttgcggcgacggcgggaagtactgtttcggctgcgatagtagcgagtgcctcggtaaccaggagtaggaataatagatgggtgtacgacatagttgggcatcaacagacttgctggaccgtactttcgtcgggatcttcgagtgggaccgacggcgtcagttgtaataggcatgggcatccatgggtccgtttgcacttcagtggaggtggcagtaggctttgcgggttcagtttgcacttccatactttcagtgggaattttaatgtctacagtttgtactcccagaccaggcgctacctgcttaatgggtctcactttaacctcaggttgaatatctggatccacttttactttctccaaaacgtcctccaacttctggcgtttgggcaccatcagttgcatagtgggatacaaatcttcaccttcgcgtttaacacctgttcgcggagttacgggtaacacttgctgcaaagtgaccggtttaagactaggggtgggatttccatgatccaagggtatggacactgtttcatccttgggatttattctactacgcttgccataagcaaactcgcctaatcggtcagctgcctgctcaagaatatcatcatccccgtacacctcatcataggaacgcttaaaagtagcgcttgaacgctcgccgggtgtaaagaccaccgaagttccaggtctcaacacatgtcgaactttgcgcccacgccattgcacgcgtcgccgtggggcaaactcgcgcacaaactccgccagcccatcatcgccatcttcctcttcttttttgtccttttttacccgcttgattttgcggggttttttttcatccttcaacggttggccgtagacttcaggtgcgataacctgcagcatttcttccttgtatttgcgcttggacatcctcgccgctgggacacaacatcggagactgctcagtatcttctaagtgcgagggggacgggtgcgcacgggtacacgttgaccggtggcagcgtcacgcacccagtatacattgcctcttcgcgattgggccatgtcggcaatagtcgccgctgcgacagcggctgcttgcctgcgggacctgccggcgctggcgcccgaagctgcacgtctggccgccctaagcatggctcttcgccccacgcgtctagctcttcgtagcagagctcttgctgctcgcatggcagtggtagctcggtgacgtctggcaatgcgccttcgccggctcttacgtcgagcatagttgcgagcgtcagccactacactgtcaataactgcgtccacagtagatgtaggcgcagtaggagtataattacgggcgtcggcaaccacctgatcgattacatcatcgacggtggttcgaacgcgagtgcggcccttgagggcaccccatggagcgcgaaaatgcccgcgaacacgcacgggatgttgggtagaacgtttgcgtgcgcctccgtacatcttgctgggagcgcgcagaccccaaccggtgttattactgggcgagataagaacggacattttttttttttttttagaaagtgcggcttgaaaggacgcgcggtgcgactatgcccagtgccttgtacacgtagggacaggtgcggcgtctggcgtcagtaacggtcacacgttggactccccggatactgctgcgcaacggcagggtcccgtgatctgtgagagcaggaacgttttcactgacggtggtaattgtgggcgccggcggacggattaaaatctggttctcaggaaagcggttgaagacgtgcgtaagcgaggtggactggcggagctgctgggagtacacagcttgttcgttgtagaagctctttgaaaagacgggcataagctctgcacccaccacagggtagttactgacttgtctagtggagcggaaagtgacaggatcctgcatcatgtctggaagcgaccagtagacctgctccgctccgcaggtgacatctgaggtggtgagcaatgtccaggaacgcactcctttttcggggtcgccataattgtacgaaaggtaccaactgcgataggccgtgttgattttatcttccaacacattgtaacttctgtttttgccatctttttccacaggcttaatagtgagttttaactctatgttttgagacacatcatccaataatgattctttagtcggaacggatgttgcggcaaaactgtctcccctgatttcactagcgttagccacccttaccggatcgttggcaactatgtttgctttagcttctgcagcagcttctattttggctttttgatctttcttgctgttctcataagcatctacatccaaaagggctggaatatttcctccttctaaatcctcatacaagatcttaaaaccctcttggaatgggtgtttctttctaatgccaagaaggttgctcagacggctttcggtaaagtccactccgcagccaggcagcaatacgatgtcaggatggaaggcctcataggtgtaaaccccaggcatgatcaacttagtttctggatcccatcccaacttgaagttcctagtgtcgaacttaacaccaatgtcactttccaacactccattctgtctgcccactttcaagtaattgtctatgatggcattgttcatcaagtcgatagtcatagtgaccgaaaagttgccttctggcaaagtaaactcgaaccactcgtattttagaatatcttgcttatgatcataattatcgtctactctaacaccctcaggaggttttctggacaccatcacacgcgctttgaacttgttactaaacatatactcgttcacgttgggcatgttagtatgcatgatggtttttagctgaccgccccaccgcgatcgttcatcaaagttaatggtctgggtgctggcttccgtaggggtaaagtcattgttttgcaccaccgtggtcaagaagttgctgtggtcattctgatagttcagagaagcaatgtccgccgacttgttgtccaccagatacaacctggtggtatcgtactgaggtgccagttccgagtaacgaatgctgtttctgccctccgtaggtgccaggtatcgcggaggcacaaagggagcctccagtggggattgcatcaccgccgtcgcctgctgctgctgcatcacgctctcgtacgaaggaggaggaccctccggatacaccaccgctccgcctagcacgactcgcctcattatactagacacagataataaagaagaacgaacgtacgctcgtcgccatggccttggtgagttttttcttttttatttttttttacaacataccacccaagcgagggcgcaaatgagcaaacgggttgccccttcctctcccacccaagtccaatacgctgctatcatcggccgaatcctcatcgtcccacacaagacccctctgtctgtcatggcgctggcgtctacggctcgctctacttgtagtccccatgatcccaggctcgtctctgtgatcctgagcataagtcttccatctactcattttatccaccaaactttctattccattgtttgggaaatttttttctcttgccggtctgagcaaggaatcgtttaggtactcctcttcgcccattaaactcgggcgacttattctacccacttcgctgctacgtacactgtgtagagaaaagggtagactaggaaaaggacttgcagactcgggctcagccgcggtagcaccaatgaccccggacagcgatgcagaagaatgcattctatcgccgccttcctttttccacgtgcgatgatcagaaagaggtgaaaaaacatcgctgtccacgtcgtcccacagaaatccgtcattagggtcgggcatgtcatattcgcccgtgtagaaaccaggtgggggcagccagtgcgggtttaagatggcattggtgaaataatcagagttcatagcggcagctctgtgcaagtagtccagcagtttgttaatgaaaggtcggttactggcatacatgctgggctccatatttcgcgctgtcatgtccagtgctgcagtcggagttgccccctcttgcatcagaaacaatcccacgctctgctgcacatatctaaggatcctctcctcctccgcagtaagagcatattgaggagggatcttttgagaccgattggtaagcaagaagttcagagtggcttccaaactgccagtgtcttcctgtcccaaagcgcgactgacttgggtaatttcttgataggtctgctcgtccacctgactttgccctatggcttcgcgatacaggtttagtaggtaacccaaataggaattacggtcgatgctaccgctgtcggtgaaaggagctaccaacagtaataataggcgggagttcggagttaacaagctagacacggttgctctttctcctaccggggcatgcactccccacaaacctttaaggtttttaaaagcttggctcagatttaccgtctgcaagccctgtctgctagtctgaaagaagtaatcaggaccggactgatatacttcgctctgaggtacttctgataccatcagtctcaaagcacttaaaaagttagtataatcctgttgaccacgcggcacattagcaggctgagtactcaagaaagcatttaacgccaccagcgaacccaggttggcatcgcgctggaacctttcgcgctgagacacggcttcgcgtacatctgttatcatacggtccaaattggtttgcacattgctactgttgtagcgagccacgcgttctaagagagcgttgtataccagtccggcctcatctggacgaatagctttgttctccaccaacgcgttcacgatggccaggaccttctcatgagtgggattagagcgggaaggcactacagcttccatgatggccgatagacggttggcctggggttgctgtctaaaggcttcggggttgcgagtcgtcaacgccatgatacgttgcatggcctgggtccaatcgtccgaggagttaatgccggacggctggctctgcagcgccgcccgcattgcgggatccggtgcttgctgttccatctagcaaaaaacacgggttgtgccatcagtcttccaagtactcgccctcttcctcctcgccttcatccgcctcttctatgtaaggaagctcacatcctgccgtcgcggcgttcagagccctgcgactaggctgccactgcaagtcagctcccatatcaaagtaattctcaccctcggttccagctccagttagagctctttgcaaactgtgcatcagttccctgtcgcttaactcgcgcctcctgctggcgctcaccgcgcgatgcattctgtcattgcggtacaccccaagatcatcgctcagggtcaacaccttcagcgtcatgcgcatgtagaacccatctatcttcacctccttgtctatgggaacgtatggagtcttgtagatcttgcgagcgtaatactttcccaagctcaaaaccgagtaattgatggcagccaccttctcggccaggcccaggctccgctcctgcactatgatactctgtagaatgttgataagatcatacaaccatctcccctcgggttcggtgatgttgagcagcgcctctctgaaagcctcattgtctctgctgtgttgcaccaccagaaacagctgtgcggtcagaggtttgctagtagggttctgaatgatagcttccatcaaatcccacaaatgcatcaaaccaagggtgacttcttcgcgggcaatgagggttcgcacatgattattaaaagacttttggaaattacgctcttcctttactgtctgttcgtaagccgatacaaggttggctgcagccacgtgtgccctggcaggactgatccctgtcacttcatcaacttcgaaatcctcgtcccgcaacactcgtcttctgtccaaaccgtgacgcagctcacgacccgcgttaaagcgggaagctcgcatctcctccggctcctcgccgcttctgtctctaaataggttctgttggggcacatacgcctcgcgagaatcttttttcagttgaactcgcggatgccgctcgggcgaaggcgcacctagacgtgccagtccttcgccctcttccaagtccagatcataggcgggctgtcccgcaccgctcacagcggcagttgcagtagttgcagggacagccttttgtggttgctgctgctgcgaggggggctgttgttggggacgcatctgtcgcagcacgggatgcatctgagcggcaaaaaaaaaaaataggactcacttccctgccattcggcaaccagcaaaacgactcgattccgtatcctggatttttgtaggctgggtcgagacgggagtgccaataccacgttagccgcggctccggccggctcgagtacaagtctcgaaccggggtacaccgcgacccaacccgttcacgttcctccaggctacggagtcgagtcgctgaacgctttcattttctccgtgtctatagagcatcaatgactgcgcgcgcctcactggtcaaaccgtgcctacaatgaactacttcatgccgctacgcaacatttggaaccgcgtacgcgagtttcctcgggcttctactaccgccgcaggaatcacctggatgtccaggtacatctacggctatcaccgccttatgttggaagacctcgcccccggcgctccagctacagaacgatggcctctctaccgccaaccaccgccgcattttcttataggttaccagtatctggtgcgcacctgcaacgattacatctttgacacccgcgcctattcgcgccttaaatacaccgagctcgtgcgccctggtcaccagacagttaactggtcagtcatggccaactgtgcttacaccattaataccggggcttaccaccgctttgtggattttgatgactttcaagccaccctcacccaagtacagcaagccatcctcgccgaaagagtcgtagctgacttggcactggtacaaccaatgcgcgggtttggactcacacgtatgcatggcagaacgggtgaggaagaagtgcccgtagaacggctcatgcaagactactacaaagatcttgctagatgtcaggataatgcttggggaatggccaatcgcctgcgtatccagcaagccggacccaaagacctggtgctcctcgccaccatccgccgtcttagaactgcctactttaatttcatcaccagcagcatcgtctcaccttcccgagatgaagaagaaacagaagacccagaccgaacacataaccacccccgcccacaagaagccgtactcagcctaccttgtgactgtgactggttagacgctttcgtcgaaaggttttcagatcccgtggatcttgacacgatcagatctctgcgcgcagtccctacgggccaattaataaaatgtataatcagcgccctctccctcccaaacggagaacctcccagtcaccactttaaggagatgcgcggcggtgtttttactctgcgaccgcgcgagaacggccgcgccgtcactgaaaccatgcgccgccgccgcggagaggtcattgaacgattcatcgaccgtttgcccgtgcgccgtcgacgtcgccgtgtgccccctccgcccccgcctgaagacgaagaagagatgttagtggaagaagagatagaagaggaagaagagatcccgggagccttcgaacgcgaagtacgggccaccatagccgaactcatccgtcttctcgaggaggaattgaccgtgtccgcgcgaaactcccagttttttaattttgccgtggacttctacgaggccatggagcgcttggaagctctgggcgatgtcagcgaaatgccgctgagacgatggatcatgtatttcttcgtcgccgaacacattgccaccacactcaactacctttttcagcgcctatgcaactatgcggtcttcaccagacacgtggagcttaacctcgctcaggtggtgatgcgcgcaagagactccgagggggccgtggtttacagccgcgtctggaacgaggcgggcatgactgcattctcccaactcatgggccgtatctccaatgacctcgcggccaccgtcgagagagcgggtcgcggagatcttcaggaggaagaaatcgagcagttcatggcggagatcgcctaccaggacaactctggtgacgtacaagaaatactgagacaagctgccgttaacgataccgaaattgattctgttgaactctctttcaggttcaagctcacggggccggtagctttcacccagagacgtcagatacaagacgtcaatcgacgcgtggtggcgcacgcaagtcttctcagagcgcagtaccagaacctgcccgtgcgcggcgccgacgtgccactaccagccatgcctccgggtccggaacaaccgcttccgcccggcgcgcgtccccgtcatcgcttctgagcatgcaagaagcaagagagccaccaccgatcaaaagaaaaaacaaaggtacggtagtggcgcccaaaggacacggaaccctgcaagccattgacatctctacaaacgaacctgtggaaatcaagtaccatctgaacctcccgcacgccctggaaaagatcatgcaagttaatcttctgtccctacctactaacctgagtccgcagcgtctcaggactctggacagctccagcctgcgcgctctggtccttcagctccgcccctcccgcgccgaggtctggacttgcctcccgcgggggctcgtcagcatgaccaccaccgaaacagaagatgaacaggccgatacagcgaatatagaagagcacgagatacaatcgccaggcctcggcttcccactgaaatttctcgtcaagggaagccaggtacagctcattcacgagatacaacccgtgcaacgctgcgactactgcggccgtctgtacaagcacaaacacgaatgctcggcgcgccgcagaaacttctacttccatcacatcaacagccaatcctccaactggtggcaggaaatccagttcttcccgatcggctctcatcctcgcacagaaagactcttcctgacctacgatgtggaaacttacacctggatggggtcctttggcaaacaactagttcctttcatgctggtcatgaaactctcaggagaagagcgtctcgtcaacatggcccacgatctagccattaaactaaagtgggatcgatggcaacaagaccccagaaccttctactgtgtcactccagaaaaaatggcaattggccagcattttcgtcagtatcgggaccagttacaaacagcactggcggtggatctttggtcatcattcctacatgcaaatcctcacctgcacgaatgggctctcgaacactacgccttatctgaccctacagacctaacctttgatgagctcaataagctacctcacgtcaaaggcacgccgcgtttcatagaattatacatcgtaggacacaacatcaacggtttcgacgagatcgtcctagctgcccaggtgatcaacaatcgagcggaagtaccacagcctttccgcatcactcgcaattttatgcccagagccggtaagattctcttcaacgatgttactttcgctttgcccaaccccgcctacaagaaacgggtagacttccaactctgggaacagggagcctgtgacgacatggacttcaaataccaatttctcaaagtcatggtcagagacaccttcgcccttactcacgcttcgctgcgaaaagctgctcaagcatactctctacccgtagagaagggctgctgcccttacaaggcagttaatcagttctacatgctaggatcttaccgtgcagacaaagacgggtttccgctagaagagtactggaaggatcgcgaagaataccttctcaaccgcgaactgtgggaaaagaaaaaccaaccaggttatgacatcattcaagaaacacttgactactgcgccctagacgtacttgtcaccgccgaactggtaaccaagcttcaagaatcttatgcccactttgtcagagactctgtaggtctacctcatgcccatttcaacatttttcaaagacccaccatctcttccaattctcacgccatctttcgccagattgtctacagaacagaaaaacccaatcgcaccaacttgggtccggggttgctagcgccatcacatgaactatatgactatgtgcgagcaagtatcagaggggggcgatgctatccaacctatataggcatctttgaggatcccatctacgtctatgacatctgtggcatgtatgcctctgcactcacccatcccatgccctggggcagtccccttaacccatatgagcgtgcactggcagctcgagaatggcaaatggccttagatgaccccactcccatcagctattttgataaggatttacttccgggaatctttaccatggatgcagaccctcccgatgaacttatgctagacccacttccccctttctgttctaggaaaggaggtaggctctgttggaccaacgaaccccttcgaggcgaggtggccaccagtgtggatttaattaccttgcataatcgagggtggcaagtgagaatcgtgccagatgaattgacaactatcttccccgaatggaagtgcctagcacgcgagtatgtccaactcaacatcgctgccaaagagcgcgcggacaaggaaaagaaccaaaccatgcgatccattgccaaacttttatccaacgccctgtatggatcatttgccaccaaacttgacaataaaaaaattgtgttttctgaccaaatggacgaaaacctcatgaaaggcatctcaaccggcactgtcaatatcaaatcctcctcgttcttagaaactgacaacctgagtgcagaggtcatgcccgccttcgagagggaatacctaccccaacagctgacgttcctggacagcgatccggaagacagtgaggaagagcaaagaaccgcccccttttatacccccccagcggggaccccaggtcacgtgaaatacacctacaagccaatcacattcctggatgttgaagagggtgacatgtgtttgcatactttggaaaaggtggaccccctggttgacaacgatcgctacccctcccacatagcctcctttgtgctggcctggacgcgcgcctttgtatcagagtggtcagagttcctgtacgaagaagaccgaggcactccactggagaagaggcctgtaaaatcagtctacggggatacggacagcctgtttgtcactcaacgaggacacgaactcatggagaccaaaggtaagaaacgcatcaaaaaatatggcggaaaacttgtttttgaccccaatgaaccggatttaacctggctggtggaatgtgaaactgtttgcgcctcctgcggcgcagatgcatactccccagaatccattttccttgcgcccaagctgtatgcgctgaaatgcctatactgcccggtatgcaagaaaacttccaaaggtaagctccgcgccaaaggccacgcagccgaggcgctcaactacgaactcatggtaaactgctacttggccgacatacagggcgccaagcgacagaagttctccaccagcagaatgagtctgaagcgcaccctggcaagcgcccaagcaggcgcacaccccttcactgtgacggaaacaaccctgactcgaacactgagaccctggaaggaccgaaccctggcagcgctggacgcccatcgtctcataccctactccaggagccgtccaaacccgcgaaacgaggaggtctgctggatcgagatgccatagaacacatcactgaactgtggaacagactagaacttttgcagcaaactctctccaaaatgcccatggctgacggtctaaaaccgctgaaaaacttttcctcactacaagaacttctatcactaggaggagagcgcctcctaatggatttggtgcgggaaaatatgcatgtaagggaaatgatgaacgaggtggcccccttgcttcgagaagacggcagttgccgttccctaaactaccacctgcaacctgtaatcggaatcatttatggccccaccggatgtggcaaatctcaattgctcagaaacttgctatcatcccaactaatcacccccgccccagaaacggtgttcttcatagccccccaggtggacatgattccaccatcggaactgaaagcttgggaaatgcaaatctgtgaggggaactatgctccggggcccgaaggaacattcataccccaatcgggtactctccgccccaaattcattaaaatggcttatgatgatttaactcaggaacataactatgatgtgtcagacccacggaacgtgtttgcccgcgctgctgcccacggccccattgctattatcatggatgagtgcatggaaaatctcggaggacacaagggtgtctccaaatttttccacgcttttccatccaagctacacgataaatttcctaaatgtaccggatacaccgtcttggtggtccttcataacatgaacccaagacgagatcttggcggcaatattgccaacttaaaaatccaatccaaaatgcacataatttcaccccgaatgcacccctcccagctcaaccggtttgtaaacacctacaccaagggcttatctgtggcaatcagcctacttctaaaagatattgtgcaacaccatgcactgcgaccttgttatgactgggtgatttacaacactaccccggagcatgaatcccttcaatggagctatctccaccccaaagatggcctaatgcccatgtatctaaacattcaatcccacctctataggattctggaaaaaatccaccgtgttctcaatgatcgagatcggtggtctagggcataccgtgcgcgaaaaatgaaataaaaacacttgattttaaatcaa

SEQ ID NO: 214 - DNA, 3441 bp, Human adenovirus
  misc_feature 1..3441: note = Human adenovirus 34, Ad34 E3
  source 1..3441: mol_type = genomic DNA
atgtctggtgacgcggctgagctatctcggctgcgacatctagaccactgccgccgctttcgctgctttgcccgggaactcattgagttcatctacttcgaactccccaaggatcaccctcaaggtccggcccacggagtgcggattactatcgaaggcaaaatacactctcgcctgcaacgaattttctcccagcggcccgtgctgatcgagcgagaccagggaaacaccacggtttccatctactgcatttgtaatcaccccggattgcatgaaagcctttgctgtcttatgtgtactgagtttaataaaaactgaattaagactctcctacggactgccgcttcttcaacccggattttacaaccagaagaacgaaacttttcctgtcgtccaggactctgttaacttcacctttcctactcacaaactagaagctcaacgactacaccgcttttccagaagcattttccctactaatactactttcaaaaccggaggtgagctccaaggtcttcctacagaaaacccttgggtggaagcgggccttgtagtgctaggaattcttgcgggtgggcttgtgattattctttgctacctatacacaccttgcttcactttcctagtggtgttgtggtattggtttaaaaaatggggcccatactagtcttgcttgttttactttcgcttttggaaccgggttctgccaattacgatccatgtctagacttcgacccagaaaactgcacacttacttttgcacccgacacaagccgcatctgtggagttcttattaagtgcggatgggaatgcaggtccgttgaaattacacacaataacaaaacctggaacaataccttatccaccacatgggagccaggagttcccgagtggtacactgtctctgtccgaggtcctgacggttccatccgcattagtaacaacactttcattttttctgaaatgtgcgatctggccatgttcatgagcaaacagtattctctatggcctcctagcaaggacaacatcgtaacgttctccattgcttattgcttgtgcgcttgccttcttactgctttactgtgcgtatgcatacacctgcttgtaaccactcgcatcaaaaacgccaataacaaagaaaaaatgccttaacctctttctgtttacagacatggcttctcttacatctctcatatttgtcagcattgtcactgccgctcacggacaaacagtcgtctctatccctctaggacataattacactctcataggacccccaatcacttcagaggtcatctggaccaaactgggaagcgttgattactttgatataatctgcaacaaaacaaaaccaataatagtaacttgcaacatacaaaatcttacattgattaatgttagcaaagtttacagcggttactattatggttatgacagatacagtagtcaatatagaaattacttggttcgtgttacccagttaaaaaccacgaaaatgccaaatatggcaaagattcgatccgatgacaattctctagaaacttttacatctcccaccacacccgacgaaaaaaacatcccagattcaatgattgcaattgttgcagcggtggcagtggtgatggcactaataataatatgcatgcttttatatgcttgtcgctacaaaaagtttcatcctaaaaaacaagatctcctactaaggcttaacatttaatttctttttatacagccatggtttccactaccacattccttatgcttactagtcttgcaactctgacttctgctcgctcacacctcactgtaactataggctcaaactgcacactaaaaggacctcaaggtggtcatgtcttttggtggagaatatatgacaatggatggtttacaaaaccatgtgaccaacctggtagatttttctgcaacggcagagacctaaccattatcaacgtgacagcaaatgacaaaggcttctattatggaaccgactataaaagtagtttagattataacattattgtactgccatctaccactccagcaccccgcacaactactttctctagcagcagtgtcgctaacaatacaatttccaatccaacctttgccgcgcttttaaaacgcactgtgaataattctacaacttcacatacaacaatttccacttcaacaatcagcattatcgctgcagtgacaattggaatatctattcttgtttttaccataacctactacgcctgctgctatagaaaagacaaacataaaggtgatccattacttagatttgatatttaatttgttctttttttttttatttacagtatggtgaacaccaatcatggtacctagaaatttcttcttcaccatactcatttgtgcatttaatgtttgcgctactttcacagcagtagccacagcaaccccagactgtataggagcatttgcttcctatgcactttttgcttttgttacttgcatctgcgtatgtagcatagtctgcctggttattaattttttccaacttctagactggatccttgtgcgaattgcctacctgcgccaccatcccgaataccgcaaccaaaatatcgcggcacttcttagactcatctaaaaccatgcaggctatactaccaatatttttgcttctattgcttccctacgctgtctcaaccccagctgcctatagtactccaccagaacaccttagaaaatgcaaattccaacaaccgtggtcatttcttgcttgctatcgagaaaaatcagaaattcccccaaatttaataatgattgctggaataattaatataatctgttgcaccataatttcatttttgatataccccctatttgattttggctggaatgctcccaatgcacatgatcatccacaagacccagaggaacacattcccctacaaaacatgcaacatccaatagcgctaatagattacgaaagtgaaccacaacccccactactccctgctattagttacttcaacctaaccggcggagatgactgaaacactcaccacctccaattccgccgaggatctgctcgatatggacggccgcgtctcagaacagcgacttgcccaactacgcatccgccagcagcaggaacgcgcggccaaagagctcagagatgtcatccaaattcaccaatgcaaaaaaggcatattctgtttggtaaaacaagccaagatatcctacgagatcaccgctactgaccatcgcctctcttacgaacttggcccccaacgacaaaaatttacctgcatggtgggaatcaaccccatagttatcacccagcaaagtggagatactaagggttgcattcactgctcctgcgattccatcgagtgcacctacaccctgctgaagaccctatgcggcctaagagacctgctaccaatgaattaaaaaatgattaataaa

SEQ ID NO: 215 - DNA, 972 bp, Human adenovirus
  misc_feature 1..972: note = Human adenovirus 34, Ad34 fiber
  source 1..972: mol_type = genomic DNA
atgaccaagagagtccggctcagtgactccttcaaccctgtctacccctatgaagatgaaagcacctcccaacacccctttataaacccagggtttatttccccaaatggcttcacacaaagcccagacggagttcttactttaaaatgtttaaccccactaacaaccacaggcggatctctacagctaaaagtgggagggggacttacagtggatgacactgatggtaccttacaagaaaacatacgtgctacagcacccattactaaaaataatcactctgtagaactatccattggaaatggattagaaactcaaaacaataaactatgtgccaaattgggaaatgggttaaaatttaacaacggtgacatttgtataaaggatagtattaacaccttatggactggaataaaccctccacctaactgtcaaattgtggaaaacactaatacaaatgatggcaaacttactttagtattagtaaaaaacggagggcttgttaatggctacgtgtctctagttggtgtatcagacactgtgaaccaaatgttcacacaaaagacagcaaacatccaattaagattatattttgactcttctggaaatctattaactgatgaatcagacttaaaaattccacttaaaaataaatcttctacagcgaccagtgaaactgtagccagcagcaaagcctttatgccaagtactacagcttatcccttcaacaccactactagggatagtgaaaactacattcatggaatatgttactacatgactagttatgatagaagtctatttcccttgaacatttctataatgctaaacagccgtatgatttcttccaatgttgcctatgccatacaatttgaatggaatctaaatgcaagtgaatctccagaaagcaacatagctacgctgaccacatccccctttttcttttcttacattacagaagacgacaactaa

SEQ ID NO: 216 - DNA, 126 bp, Human adenovirus; identical to SEQ ID NO: 144
  misc_feature 1..126: note = Human adenovirus 34, Ad34 fiber tail
  source 1..126: mol_type = genomic DNA

SEQ ID NO: 217 - DNA, 273 bp, Human adenovirus
  misc_feature 1..273: note = Human adenovirus 34, Ad34 fiber shaft
  source 1..273: mol_type = genomic DNA
gacggagttcttactttaaaatgtttaaccccactaacaaccacaggcggatctctacagctaaaagtgggagggggacttacagtggatgacactgatggtaccttacaagaaaacatacgtgctacagcacccattactaaaaataatcactctgtagaactatccattggaaatggattagaaactcaaaacaataaactatgtgccaaattgggaaatgggttaaaatttaacaacggtgacatttgtataaaggatagtattaacacc

SEQ ID NO: 218 - DNA, 570 bp, Human adenovirus
  misc_feature 1..570: note = Human adenovirus 34, Ad34 fiber knob
  source 1..570: mol_type = genomic DNA
ttatggactggaataaaccctccacctaactgtcaaattgtggaaaacactaatacaaatgatggcaaacttactttagtattagtaaaaaacggagggcttgttaatggctacgtgtctctagttggtgtatcagacactgtgaaccaaatgttcacacaaaagacagcaaacatccaattaagattatattttgactcttctggaaatctattaactgatgaatcagacttaaaaattccacttaaaaataaatcttctacagcgaccagtgaaactgtagccagcagcaaagcctttatgccaagtactacagcttatcccttcaacaccactactagggatagtgaaaactacattcatggaatatgttactacatgactagttatgatagaagtctatttcccttgaacatttctataatgctaaacagccgtatgatttcttccaatgttgcctatgccatacaatttgaatggaatctaaatgcaagtgaatctccagaaagcaacatagctacgctgaccacatccccctttttcttttcttacattacagaagacgacaac

SEQ ID NO: 219 - DNA, 1677 bp, Human adenovirus
  misc_feature 1..1677: note = Human adenovirus 34, Ad34 penton
  source 1..1677: mol_type = genomic DNA
atgaggcgagtcgtgctaggcggagcggtggtgtatccggagggtcctcctccttcgtacgagagcgtgatgcagcagcagcaggcgacggcggtgatgcaatccccactggaggctccctttgtgcctccgcgatacctggcacctacggagggcagaaacagcattcgttactcggaactggcacctcagtacgataccaccaggttgtatctggtggacaacaagtcggcggacattgcttctctgaactatcagaatgaccacagcaacttcttgaccacggtggtgcaaaacaatgactttacccctacggaagccagcacccagaccattaactttgatgaacgatcgcggtggggcggtcagctaaaaaccatcatgcatactaacatgcccaacgtgaacgagtatatgtttagtaacaagttcaaagcgcgtgtgatggtgtccagaaaacctcctgagggtgttagagtagacgataattatgatcataagcaagatattctaaaatacgagtggttcgagtttactttgccagaaggcaacttttcggtcactatgactatcgacttgatgaacaatgccatcatagacaattacttgaaagtgggcagacagaatggagtgttggaaagtgacattggtgttaagttcgacactaggaacttcaagttgggatgggatccagaaactaagttgatcatgcctggggtttacacctatgaggccttccatcctgacatcgtattgctgcctggctgcggagtggactttaccgaaagccgtctgagcaaccttcttggcattagaaagaaacacccattccaagagggttttaagatcttgtatgaggatttagaaggaggaaatattccagcccttttggatgtagatgcttatgagaacagcaagaaagatcaaaaagccaaaatagaagctgctgcagaagctaaagcaaacatagttgccaacgatccggtaagggtggctaacgctagtgaaatcaggggagacagttttgccgcaacatccgttccgactaaagaatcattattggatgatgtgtctcaaaacatagagttaaaactcactattaagcctgtggaaaaagatggcaaaaacagaagttacaatgtgttggaagataaaatcaacacggcctatcgcagttggtacctttcgtacaattatggcgaccccgaaaaaggagtgcgttcctggacattgctcaccacctcagatgtcacctgcggagcggagcaggtctactggtcgcttccagacatgatgcaggatcctgtcactttccgctccactagacaagtcagtaactaccctgtggtgggtgcagagcttatgcccgtcttttcaaagagcttctacaacgaacaagctgtgtactcccagcagctccgccagtccacctcgcttacgcacgtcttcaaccgctttcctgagaaccagattttaatccgtccgccggcgcccacaattaccaccgtcagtgaaaacgttcctgctctcacagatcacgggaccctgccgttgcgcagcagtatccggggagtccaacgtgtgaccgttactgacgccagacgccgcacctgtccctacgtgtacaaggcactgggcatagtcgcaccgcgcgtcctttcaagccgcactttctaa

SEQ ID NO: 220 - DNA, 2856 bp, Human adenovirus
  misc_feature 1..2856: note = Human adenovirus 34, Ad34 hexon
  source 1..2856: mol_type = genomic DNA
atggccaccccatcgatgctgccccaatgggcatacatgcacatcgccggacaggatgcttcggagtacctgagtccgggtctggtgcagttcgcccgcgccacagacacctacttcaatctgggaaataagtttagaaatcctaccgtagcgccgacccacgatgtgaccaccgatcgtagccagcggctcatgttgcgcttcgtgcccgttgaccgggaggacaatacatactcttacaaagtgcggtacaccctggccgtgggcgacaacagagtgctggatatggccagcacgttctttgacattaggggcgtgttggacagaggtcccagttttaaaccctattctggtacggcttacaactccctggctcctaaaggcgctccaaatgcatctcagtggttggataagggagttacaagcactggcctagtggacgacggcaatactgatgatggggaagaagccaaaaaagcaacatacacttttggtaatgctccagtaaaagccgaggctgaaatcacaaaagacggattgccggtgggcttggaagtttcaactgaaggtcctaaaccaatctatgctgataagctttatcagccagaacctcaagtgggagacgaaacttggactgacctagacggaaaaaccgaagagtatggagggagggttcttaaacctgaaactaaaatgaaaccctgctacggatcttttgctaaacctactaatattaaaggaggtcaggcaaaggtaaaaccaaaagaagacgatggcactaacaacatcgagtatgacattgacatgaacttctttgacttaagatcacaaagatcagaactcaaacctaaaattgtaatgtatgcagaaaatgtggacctggaatgtccagatactcatgttgtgtacaaacctggagtttcagatgctagttctgagaccaatcttggacaacagtctatgcccaacagacccaactacattggcttcagagataacttcatcggacttatgtactataacagtactggcaacatgggggtactggctggccaagcgtctcagttgaatgcagtggttgacttgcaggacagaaacacagaactgtcttaccaactcttgcttgactctctgggcgacagaaccagatactttagcatgtggaatcaggctgtggacagttatgatcctgatgtacgtgttattgaaaatcatggtgtggaagatgaacttcccaactattgttttccgttggatggtgtcggtccgcgaacagatagttacaaggagattaagccaaatggagaccaatctacttggacaaatgtagacccaactggcagcagtgaacttgctaagggaaatccatttgccatggaaattaaccttcaagccaatctatggcgaagtttcctttattccaatgtggctctatatctcccagactcgtacaaatacaccccgtccaatgtcactcttccagaaaacaaaaacacctacgactacatgaacgggcgggtggtgccgccatctctagtagacacctatgtgaacattggtgccaggtggtctctggatgccatggacaatgtcaacccattcaaccaccaccgtaacgctggcttgcgttaccgatccatgcttctgggtaacggacgttatgtgcctttccacatacaagtgcctcaaaaattcttcgctgttaaaaacctgctgcttctcccaggctcctacacttatgagtggaactttaggaaggatgtaaacatggttctacagagttccctcggtaacgacctacgggtagatggcgccagcatcagttttacgagcatcaacctctatgctacttttttccccatggctcacaacaccgcttccacccttgaagccatgctgcggaatgacaccaatgatcagtcattcaacgactacctatctgcagctaacatgctctaccccattcctgccaatgcaaccaatattcccatttccattccttctcgcaactgggcggctttcagaggctggtcatttaccagactgaaaaccaaagaaactccctctttggggtctggatttgacccctacttcgtctattctggttctattccctacctggatggtaccttctacctgaaccacacttttaagaaggtttccatcatgtttgactcttcagtgagctggcctggaaatgacaggttactatctcctaacgaatttgaaataaagcgcactgtggatggcgaaggctacaacgtagcccaatgcaacatgaccaaagactggttcttggtacagatgctcgccaactacaacatcggctatcagggcttctacattccagaaggatacaaagatcgcatgtattcatttttcagaaacttccagcccatgagcaggcaggtggttgatgaggtcaattacaaagacttcaaggccgtcgccataccctaccaacacaacaactctggctttgtgggttacatggctccgaccatgcgtcaaggtcaaccctatcccgctaactatccctatccactcattggaacaactgccgtaaatagtgttacgcagaaaaagttcttgtgtgacagaaccatgtggcgcataccgttctcaagcaacttcatgtctatgggagcccttacagacttgggacagaacatgctctatgccaactcagctcatgctctggacatgacctttgaggtggatcccatggatgagcccaccctgctttatcttctcttcgaagttttcgacgtggtcagagtgcatcagccacaccgcggcatcatcgaggcagtctacctgcgtacaccgttctcggccggtaacgctaccacgtaa

SEQ ID NO: 221 - protein, 323 aa, Human adenovirus; identical to SEQ ID NO: 79
  REGION 1..323: note = misc_feature - Human adenovirus 34, Ad34 fiber

SEQ ID NO: 222 - protein, 91 aa, Human adenovirus
  REGION 1..91: note = misc_feature - Human adenovirus 34, Ad34 fiber shaft
DGVLTLKCLTPLTTTGGSLQLKVGGGLTVDDTDGTLQENIRATAPITKNNHSVELSIGNGLETQNNKLCAKLGNGLKFNNGDICIKDSINT

SEQ ID NO: 223 - protein, 190 aa, Human adenovirus
  REGION 1..190: note = misc_feature - Human adenovirus 34, Ad34 fiber knob
LWTGINPPPNCQIVENTNTNDGKLTLVLVKNGGLVNGYVSLVGVSDTVNQMFTQKTANIQLRLYFDSSGNLLTDESDLKIPLKNKSSTATSETVASSKAFMPSTTAYPFNTTTRDSENYIHGICYYMTSYDRSLFPLNISIMLNSRMISSNVAYAIQFEWNLNASESPESNIATLTTSPFFFSYITEDDN

SEQ ID NO: 224 - protein, 558 aa, Human adenovirus; identical to SEQ ID NO: 80
  REGION 1..558: note = misc_feature - Human adenovirus 34, Ad34 penton

SEQ ID NO: 225 - protein, 951 aa, Human adenovirus; identical to SEQ ID NO: 81
  REGION 1..951: note = misc_feature - Human adenovirus 34, Ad34 hexon

SEQ ID NO: 226 - protein, 42 aa, Human adenovirus; identical to SEQ ID NO: 136
  REGION 1..42: note = misc_feature - Human adenovirus 34, Ad34 fiber tail

SEQ ID NO: 227 - DNA, 114 bp, Human adenovirus
  misc_feature 1..114: note = Human adenovirus 50, Ad50 5? (left) ITR
  source 1..114: mol_type = genomic DNA
caatcaatataatataccttatagatggaatggtgccaatatgtaaatgaggtaatttaaaaaagtgcgcgctgtgtggtgattggctgcggggtgaacggctaaaaggggcgg

SEQ ID NO: 228 - DNA, 114 bp, Human adenovirus
  misc_feature 1..114: note = Human adenovirus 50, Ad50 3? (right) ITR
  source 1..114: mol_type = genomic DNA
ccgccccttttagccgttcaccccgcagccaatcaccacacagcgcgcacttttttaaattacctcatttacatattggcaccattccatctataaggtatattatattgattg

SEQ ID NO: 229 - DNA, 365 bp, Human adenovirus
  misc_feature 1..365: note = Human adenovirus 50, Ad50 Packaging Sequence
  source 1..365: mol_type = genomic DNA
acatgctgggaggtgacgtgacttatgggggaggagttatgttgcaagttatcgcggtaaaggtgacgtaaaacgaggtgtggtttggacacggaagtagacagttttcccacgcttactgacaggatatgaggtagttttgggcggatgcaagtgaaaattctccattttcgcgcgaaaactgaatgaggaagtgaatttctgagtcatttcgcggttatgacagggtggagtatttgccgagggccgagtagactttgaccgtttacgtggaggtttcgattaccgtgtttttcacctaaatttccgcgtacggtgtcaaagtcctgtgtttttacgtaggtgtcagctgatcgctagggtat

SEQ ID NO: 230 - DNA, 3431 bp, Human adenovirus
  misc_feature 1..3431: note = Human adenovirus 50, Ad50 E1
  source 1..3431: mol_type = genomic DNA
ttaaacctgtcgagttccgtcaagaggccactcttgagtgccagcgagaagagttttctcctccgcgccgcgagtcagttttgcgctttgaaaatgagacacctgcgattcctgccacaggagattatctccagcgagaccgggatagaaatactggagtttgtggtaaataccctgatgggagatgacccggaaccgccagcgcagcctttcgatccacctacgctgcacgatctgtatgatttagaggtagacgggccggacgatcccaatgaggaagctgtaaatgggttttttactgattctatgctactagctgccgatgaaggattggacataaaccctcctcctgagacccttgataccccaggggtggttgtggaaagcggcagaggtgggataaaattgcctgatctgggagcagctgaaatggacttgcgttgttatgaagagggttttcctccgagtgatgatgaagatggggaaactgaacagtccatccataccgcagtgaatgagggagtaaaagctgccagcgatgtttttaagttggactgtccggagctgcctggacatggctgtaagtcttgtgaatttcacaggaataacactggaatgaaagaactattgtgctcgctttgctatatgagaatgcactgccattttatttacagtaagtgtatttaagtgaaatttaaaggaatagtgtagctgtttaataactgttgaatggtagatttatgtttttacttgtgattttttgtaggtcctgtgtctgatgatgagtcgccttctcctgattcaactacctcacctcctgaaattcaggcgcccgtacctgcaaacgtatgcaagcccattcctgtgaagcctaagtctgggaaacgccctgctgtggataagcttgaggacttgttggagggtggggatggacctttggaccttagtacccggaaactgccaaggcaatgagtgccctgcagctgtgtttatttaatgtgacgtcatgtaataaaattatgtcagctgctgagtgttttattgcttcttgggtggggacttggatatataagtaggagcagatctgtgtggttagcttatagcaacctgctgccatccatggaggtttgggctatcttggaagacctgagacagactaggctactgctagaaaacgcctcggacggagtctctggcttttggagattctggttcggtggtgatctagctaggctagtgtttaggataaaacaggactacagggaagaatttgaaaagttattggacgacagtccaggactttttgaagctcttaacttgggccatcaggctcattttaaggagaaggttttatcagttttagatttttctactcctggtagaactgctgctgctgtagcttttcttacttttatattggataaatggatccgacaaacccacttcagcaagggatacgttttggatttcatagcagcagctttgtggagaacatggaaggctcgcagcatgaggacaatcttagattactggccagtgcagcctctgggagtagcagggatactgagacacccaccgaccatgccagcggttctggaggaggagcagcaggaggacaatccgagagccggcctggaccctccggtggaggagtagctgacctgtttcctgaactgcgacgggtgcttactaggtctacgtccagtggacaggacaggggcattaagagggaaaggaatcctagtgggaataattcaagaaccgagttggctttaagtttaatgagccgtaggcgtcctgaaactgtttggtggcatgaggttcagagcgaaggcagggatgaagtttcaatattgcaggagaaatattcactagaacaacttaagacctgttggttggaacctgaggatgattgggaggtggccattaggaattatgctaagatatctctgaggcctgataaacagtatagaattactaaaaagattaatattagaaatgcatgctacatatcagggaatggggcagaggttataatagatacccaagataaagcagcttttagatgttgtatgatgggtatgtggccaggggttgtcggcatggaagcagtaacatttatgaatattaggtttaaaggggatgggtataatggcattgtatttatggctaacactaagctgattctacatggttgtagcttttttgggtttaataatacttgtgtagaagcttgggggcaagttggtgtgaggggttgtagtttttatgcatgctggattgcaacatcaggtagggtcaagagtcagttgtctgtgaagaaatgcatgtttgagagatgtaatcttggcatactgaatgaaggtgaagcaagggtccgccactgcgcagctacagaaactggctgcttcattctaataaagggaaatgccagtgtgaagcataatatgatctgtggacattcgaatgagaggccttatcagatgctgacttgcgctggtggacattgcaatattcttgctaccgtgcatatcgtttcccatgcacgcaagaaatggcctgtatttgaacataatgtgattaccaagtgcaccatgcacataggtggtcgcaggggaatgtttatgccttaccagtgtaacatgaatcatgtgaaggtgatgttggaaccagatgccttttccagagtgagcttaacaggaatctttgatatgaatattcaactatggaagatactgagatatgatgacactaaaccgagggtgcgcgcatgcgaatgcggaggcaagcatgctagattccagccggtgtgcgtggatgtgactgaagacctgagacccgatcatttggtgcttgcctgcactggagcggagttcggttctagtggtgaagaaactgactaaagtgagtagtggggcaagatgtggatggagactttcaggttggtaaggtggacagattgggtaaattttgttaatttctgtcttgcagctgccatgagtggaagcgcttcttttgaggggggagtatttagcccttatctgacgggcaggctcccatcatgggcaggagttcgtcagaatgtcatgggatccactgtggatgggagacccgtccagcccgccaattcctcaacgctgacctatgccactttgagttcgtcaccattggatgcagctgcagccgccgccgctactgctgccgccaacaccatccttggaatgggctattacggaagcatcgttgccaattccagttcctctaataacccttcaaccctggctgaggacaagctacttgttctcttggctcagctcgaggccttaacccaacgcttaggcgaactgtctaagcaggtggcccagttgcgtgagcaaactgagtctgctgttgccacagcaaagtctaaataaagatctcaaatcaataaa

SEQ ID NO: 231 - DNA, 19668 bp, Human adenovirus
  misc_feature 1..19668: note = Human adenovirus 50, Ad50 E2
  source 1..19668: mol_type = genomic DNA
atggccagccgcggaggaaatcagtcaagcgaccgccaacgggagcacacccccgaacgcggaatgggctctgccagccatccgcctccaaggccggaccgcagcccatctcagtcgcctccacctctgcccccgaagaggaacacctaccgtcgcgtggggtccgattcttctatcgagagccaggtggtactggtaagcgaaacttcgcggtcatccctgtctccggaacggagcaacagtcctcccccgatccctcccaagaagaagcccaggaagaccaagcatgtccctctgcaagacatcagccaggacagcgaagaagaaagagaacaggctcagttggtggccgtgggcttcagctaccccccggtgcgcatcattgagaaggatggcaagagaagtgttgagaagatcgacaagaatgaccctatagctaaaggagctacttctattgctgttaggaatcctttgagcttgcccctggtatctgcctgggagaagggcatggaagtgatggctgtgctaatggagaggtataggctggataatgacctgagaacctctttcaagctgatgccagagcagcacgagcagtacaagcgtatctgccaccagtatgtgaacgaggagcaccgtggcatcccgctgacatttagtagcatgaagaccctgacagcgatgatgggaagattcatgcagggattggtgcattcttattctgagatcgcccacaataattgggagtgcaccgggtgcgctctgtgggctcatggatgcaccgattacgaaggcaaggtgaaatgcctgcatggcactatcatgatccagaaggaccacattatcgagatggatgtggcgagcgaaaacgggcagcgcgctatgaaggagaacccagacagagccaagatcacccagaaccgctggggcagaaatgtggtccagttggccaacaacgatgcccgctgctgtgtgaatgatgccaactgtgctactaaccaattttccagcaagtcctgtgggatgttttacaccgagggaagtaaggctcaggaagctttcaagcagtacgaagccttcatgaaggccgtgtacccagggataacccccgaccaagccaggatgatgctgatccccattcattgcgattgcaaccacaagccaggctgcgctcccgtgatgggcaggcagacctgtaagatgaccccctttggaatggccaatgctgaagacttggatgtgactaccatcagtgacccgaccgtgctggcaagcgtgagacacccagccttgatggtgttccagtgttgcaacccagtgtaccgcaactcccgtgtccagaatgccggccccaactgtgatttcaagatctctgctcctgacctgcttggcgccctgcaactgaccagaaagttgtggcaagacacctttcccgaaattccagttcccaagctggtgatccccgagttcaagtggcagaacaggttacagttccgcaacgtctccctgcccacgggtcactctgactcccgccagaacccatttgatttctgagtgaatgatgaaaacgaatgagcaaaaaaccagagccttagtgcatgtaaaaataaaatgctttttattgaacacggttttacatgacttattgcatatccatacggtcaaacgcggtggccctttcaatgcgtgcgcggtgagaacgaaagtaagatgagtgggtgtttaggaagcgatatagcgcctcctggttgcggcgcagggtgggctggacttggggtgattggagcatgctgtttgacaccccagtcagcaacttcatggtggggtttccgttcatggggcggtcgggccagtgcacaaaggcatgaaggaacatacagcaaaaaagtccacaggcggctgagcgcgggccctgcacgctctgggtggacttttccagggtgatgcagcggtctttggtagcaagggcactgcggcgcaggagcccctcgtactcaaactggtaaatctgtttgagtcgctcatccgagaacccaaaaggatcaaaaaggtagcaggtgttggagcgcgggttccaaccaaaagccagccagtgctctccccccgtctcgcgtccggcagtgttgactatggcgcaggcgagcttgtcgggggccatgaaccccgggaaacgcttgtcaaaggttcccaggaaatagggtccgcagcccaggtctcggacgatggctttgagctcttgctcgctggagccgtttccggacccgcatgacatggctgcagctgctgcttgcaagaagcaagaggcttcttatgtggtggcgttgccggccgagaacggtgtgcgcaggtagacggcctcgatgacgccgcggtgtggctggtgcactctgaccacgtcgaagacttcgaaaagaagataaagcagggtgggctcatccatgggatccacctcaaaagtcatgtccagcgcatgggccgagttggcatacagcaagttctgtcccaggtctgtaagggcacccatggacatgaagttgctagagaatgggatgcgccacatggtcctgtcgcacaggaattttttctgggtgacactggttactgcagtggttccaattagggggtatgggtagttagcagggtacgcttgaccctgacgcatggtaggagccatgtaacccacaaagccagagttattatgctggtagggtacggcgacagctttatagtctttgtagttaatctcatcaaccacctgtctactcatgggctggaagtttctgaagaaggagtacatgcgatccttgtaaccctcaggaacgtagaagccctggtatccaatgttgtagttggcaagcatctggaccaggaaccagtctttggtcatgttacattgggccacattgtagccttccccatcaactgtgcgcttgatttcgaactcatttggacttagcaatctgtcattaccaggccagctcactgaagagtcaaacatgatggagactttcttgaaagtgtggttaaggtagaaggtaccatccaggtagggtatagaaccagagtaaacaaagtagggatcgaaccctgatcccaaagagggagtctccttggttttgagtctggtgaaggaccagcctctgaaggcggcccagttgcgagagggaatggagatgggaacgttggtagcgttggccgggatggggtagagcatgttggcagcagaaaggtagtcattgaatgattgatcattggtgtcattgcgcagcatggcttcaagggtggaggcagtgttgtgggccatggggaagaaggtggcatagagattgatgctggtaaaacttatgctggcaccatcgacccggagatcattaccaagggaactctgcaggaccatgttcacatcctttctgaagttccactcgtaggtgtaagaaccgggtagaagcagcaggttcttcacagcaaagaatttctgaggcacttgaatgtggaaaggcacgtaacgaccattgcccaaaagcatggaccggtatcgcaggccagcgttgcggtgatggttaaaggggttgacattgtccatggcatccaaagaccatctggcgccaatgtttacgtaggtatccaccagggatgggggaaccacccgcccattcatgtagtcataagtgttggtgttagttggaagagtgacattggctggggtgtatttgtaggagtctgggagatacagagccacattggaataaagaaaacttctccagagattagcttggaggttaatttccatggcaaacggatttcccttagcaatttcacttatgccctttggctctaaatctttccaagtagtggtttcatcaccatttgtctcaattcccttgtaactgtctattcgcggacctacaccatccaatggaaaacaatagttaggaagttcatcttccacaccatggttctcaataacacgcacatctgggtcatagctatccactgcttgattccacatactgaaatatctggttctgtcccccagagaatcaagcaagagttgatatgacaattctgtgtttctgtcttgcaagtcaaccactgcatttagctgagacgcttgtccagccagcactcccatgttgccagtactgttgtagtacatgagtccgatgaagttgtccctgaagccaatatagttaggtctattgggcatggactgttgaccaaggtttgcatgagagctagcatctgaagctccaggtttgtacaccacatgagtgtcaggagtttctagatccacattttctgcatacattacaattttaggcttgaggccagtcatttgtgatcttaggtcgaaaaagttcatgtcaatgtcatattcaaccttgccttcttcttctttcttcacttttgcctgcccgcctttaacattagtaggtttagcgaaagacccgtagcagggtttcattttagtttcaggtttaagtgctctgcctccatatttttcatctgtgccatccgtatcagtccaagattcctctcccacctgaggttctggctgatacagtttatcagcataaatgggtttagggccaccttcagatggaacttccaaacctattggcagtccttcttttgtaatttcagcttcggcttttactggcgcattgccaaaagtgtatgtagcttgttggtcgtcttccccatcctcttcatctcccttattaagccactgagatgtattgggagcgcccttaggggccaatgagttgtaagcagtgccagaatatggcttgaagctaggacctctatccaacacaccccgaatgtcaaagaaagtgctggccatatccagcactctgttgtcgcccacagccaaggtgtatcgaactttgtatgcgtaggtattgtcttcccggtcaacgggcacaaagcgcagcatcagccgctgactgcggtcggtggtcacatcatgggtgggcgccacggtggggttcctaaacttgttccccagattgaagtaggtgtctgtggcgcgggcgaactgcaccagacccggactcaggtactccgaagcatcctgtccggcgatgtgcatgtatgcccactggggcagcatcgatggggtggccatcttgaaatcaactcagcctcggcgcgcgacctcttccttgctcctctgctgttgctgcggcggcggcgtgatgatgacacatacacacagacaggcaagttaagcgctactccatatttaatttaaaagcagcgacggcgctttacactttgcacgcccagacccacgatgctgttcagagtactctgccagtttgcattcggacgtggagtgcccccaggacgcggtctggctacggcgacgggctgtacggtggtgggcttcggggtagcgacaggcttgcgagcaggcgctgcaacagcagggggaggcaagtccaaggtagcgggtcggtgtgactgagaaggtttcattaccccggtagccatgggggctacaggtctggtggtgggcattccaagcttcactgcctcctcgtaggagggcgggtcgtctgagcgtgtgactagtgtctcctccagatcggggcgcggacgcttgtcgccccgcttttcaaggggagggagatcttcctccacttccatttcaccaggggctgacggcggcgggtcaaggcggctgtttatctgtttctgcacggcctggttggccagatccaccaccccattgataccagaggcgattccatcaaccaccttctgttggaagttttgctctttaagcttatttttcaatgcctgccctgtgctgctgttccaagctttgttcccataggtttttatggtagagccaaaatttttaagcccgctccagatactgctccaattgaaggcgcccccgttcagttggctggtgccgatgtcgctccaggtgcccatgtacggcctcgtgccgtgtcgcggagccagggatgaaaaattgatgtcttccatctctacaaaaacatagtcacaggaccaggagcatcagagtccattctgttttatttataagtttttccaatgtcagtggcgctgcgaggcctgaaccgccacggaagctatgcctggtatcgccccgatcgccgcggctatgatggggatcagagcaggcagaaagccaccccccagcctcttgctgatagcgcgccgccgcctgtggcgtcgcattccgcgccccaacatccctcttctacggcgcgagtttcttcctcggtagccagtaatggggacacgaaggcggcaagtgagggccatatctgcaaggaggcagcggcaacagttgttaagttgtgatgcttggatggtagcgtacgcgcggtaacgtcaggggatccgcgcggccatcgcgatacactctccgcaccagagcagcgggagtcagattgctggtggggcggcggcgacgacgatgactacgacttgcaggtgttttgcggcgacggcgggaagtgctgctcctgctgcggtagtagcgagtgcctcggtaacccggagttggaataatggatgggtgcagagcataatttggcatcagcaaacttgctggaccgtactttcgccgggatcttcgagtggtgttgacagcagctggagttgtaacgggtgcggtcatccagggatccgtttgcacctcaatggaggtggttgtgggctttgcaggttcggtttggacttccattgactcggtgggaatcttgatgtctacggtttgtactcccaaacctggcgccacctgcttgatgggtctcactttgacctcaggttgtatatcgggatccactttcattttctccagcacgtcctccagccgctggcgcttgggcaccatcaattgcatagtgggatacagatcctcaccctctcgcttgttgcctctgcgtggaggcacgggcagcacttgctgcagggtgactggcttgagactaggggtgggattcccattgtccaagggaatggacaccgcctcctccttggggctcgagcgggagcgcttgccataagcaaactcgcccaggcggtcggccgcctgctccagaatatcatcatccccatacacctcatcataggaccgcttaaaagcagtgctggagcgctcgccgggcgtaaagaccaccgtggttccaggtctcagcacaggctgcactttgcgtccacgccactgcactcgccgccttggggcgaactcgcgtacaaactccgccagaccatcattgccatcttcttcctttttgtcctttttgacccgcttgattttgcggggctttttttcatccttcaccggcggaccgtagatttcaggcgcgatgacctggagcatctcttccttgtatttgcgcttggacatcctcgctgggacacaacatcggagactgctcagtatcttctaagagcgaggggggcgggtgcgcacgggcacgcgctggccggtggtggcgtcgcgcacccagtacacattgcctcttcgcggttgggccatgttggcaatggccgctgctgccgccgtggctgcgcgcctgcgggacctgccggcactggcacctgaagccgcgcgtctggccgctctaagcatagctcttcgccccacgcgtttggccctcctcagcagagctcttgccgctcgcatagcgggagtagcccggtggcgcctggcgatgcgtctccgcctgctcttccggcgagcataggcgcgggcgtcagccactacgctgtcaataactgcatccacagtagatgtaggtgcagtaggagtataattacgagcatcggccaccacctggtcgatcacatcatcgacggtggttctagtgcgggtacgacccttgagggcgccccatggagcgcggaagtgcccgcgcacgcgcacagggtgctgtgtagagcgtttgcgagcacctccgtacatcttgcttggcgcgcgcaggccccaaccggtgttattactaggtgagataagaatggacatttttttttagaaagtgcggcttgaaaggacgcgcggcgcgactatgcccagggccttgtagacgtaggggcaggtgcggcgtctggcgtcagtaacggtcacgcgctggactccccggatactgctgcgcaacggcagggtcccgtgatctgtgagagcaggaacgttttcactgacggtggtaatggtgggcgctggcgggcggatgaggatctggttctcagggaagcggttgaagacgtgcgtgagcgaggtggactggcgaagctgctgggagtacacggcttgctcgttgtagaaactctttgagaagaccggcatgagctctgcacctaccactggatagttgctgacttgtctcgtggaacggaatgtgacagggtcctgcatcatgtctgggagcgaccagtacacctgctctgctccacaggtgacatccgaggtggtgagcagtgtccaggaacggactcctttttcagggtcaccatagttgtaggacaggtaccagctgcggtaggctgtattcactttatcttccaagacattgtaacttctactcttgctgtctttttctacaggtttaatagtgagtttggtctctgtagtttcggccacagcagccaatagcgattcttcagttgcaacagatgaagctgtatagttgtctcctctgacttcttcggcattagccacccttacagggtcgctgacaactatgttggctttagcaatagcagcagctttagcggcttctgttttggcttctcgttctttcttactgttcttataggcttctacatccaacagggccgggatattacccccttcaagatcctcatacaagatcttaaaaccctcctggaatgggtgtcttttcctgataccaagcaagttactaaggcgactttcagtaaagtcaactccgcaaccaggcaacaatacaatgtcaggatggaatgcctcataggtgtaaaccccaggcataatcaacttagtttccggatcccaacccagtctaaagttcctggtgtcaaatttaacaccaatgtcactctccaacactccattctgtctgcccacttcaaggtaattatcaatgatggcattgttcattaggtcaatggtcattgtggctgagaagttcccttccggtagagtaaactcaaaccactcatattccaaaatatcctgcttgtgatcataattgtcatctactgtgacaccttcaggagcctttctagacaccatcacccgagctttgaacttgttgctaaacatgtactcgttcacgttgggcatgttggtgtgcatgatagtcttcagctgaccgccccatcgcgaccgctcgtcaaagttgatggtctgggtgctggcctccgtgggggtaaagtcattgttttgcaccaccgtggtgaggaagttgctgtggtcgttctgatagttcagtgaggcgatgtccgcggacttgttgtccaccaaatacaaccgggtggtatcatacaatggtgccagctccgagtaacgaatgctgtttctcccctccgtaggtgccaggtaccgagggggtacaaagggagcctccagtggtggctgcatcgccgccgccgccgcctgctgcatcacgctctcgtacgaaggaggaggaccctccggatacaccaccgctccgcctagcacggttcgcctcatcatactagctataacagagaagaaacgaacgcacgctggtcgccatggccttggtgagtatttattttcggtttcttacatcaggcgcccgacgcgggggcgcaggtgagcgaacgggttaccaccactcccacccaagtccaacacgctgctgtcgtcggcggaatcatcatcggcccacaccaggccccgctgcctgtcgtgccactggcgtttacgggtagcgatgccccggctatcccccagcgcccggggatcgtccctgtgatcgtgcgcgtacgtcttccagcggttcattttgtcaaccaagctttctatcccgttgttggggaaattcttctccctctcgggtctcaacagggagtcgttcaaatactcctcctcgccgatcaagcgaggacgggttattcttcccagctcactgctgcgtacactgtttagcgaaaatggcaaactagggaaaggacttgcggcctcgggagccgctgcagcacccgttgctccggacagtgacacggaagagtgccttctatcgccaccttccttcttccaagtgttataaccaggaggcggggagaaaacactactgtccacatcgtcccataaaaacccgtcattggggtcgggcatgtcatactcgcccgtatagaacccaggtgggggcagccaatgggggttcaggatagcattggtgaaataatcagagttcatagcagccgccctgtgtaagtagtctagcagtttattgataaaaggccggttactggcatacatgctgggctccatgtttcgggctgtcatatcgagcgcagcagtaggagtcgccccctcctgcattaggaacagtcccacgctctgctgcacgtatctcaggatccgttcctcctccgcggtaagcgaatactgaggagggatcttctgcgaccggttggtcagcaagaagtttaaggtggcttccaagctgccagtgtcctcccgacccagagcgcggctcacttgggtaatttcttgataggtttgctcatctacctgagtttgccctatggcctcgcgatacaggttcaacagatagcccaagtacgaattacggtcgatgctaccgctgtcagtgaatggggctaccaagagcagtagtaggcgggagttgggggtcagcaagctagacacggtcgcccgatctcccactggggcgcgcactccccacagaccattcaggttcttaaaagcctggctcaggttcactgtctgcaagccctgtctgctggtctggaaaaagtagtctggcccggactggtacacttcgctttgagggacttcggccaccatgagtctcaatgcacttagaaagtttgtgtagtcttgctgaccgcgaggcacgttggcaggctgagtgctgaggaaggcgttcaaagccaccagcgaccctaaattggcgtctcgctggaaccgctcgcgctgagacacggcctcgcgcacatcggtcaccatccggtccaggttggtctgcacgttgctgctgttgtaacgggctacgcgctccaatagggcattgtataccagcccagcctcatcgggacgtatggctttgttctccaccagcgcgttcacgatggccaggaccttctcgtgtgtggggttggagcgggagggcactacggcctccaggatggcagaaaggcggttggcctggggttgctgtctaaaggcttcggggttgcgggtcgtcagcgccatgatgcgttgcatggcctggctccaatcgtccgaggagttaatgccggacggctggctctgtagcgccgcccgttttgcggggtccggtgcctgctgttccatctagcaaaaatatggatggtcgcgccatcagtcttccagatactcgccctcctcatcctggccttcatccacctcttctatgtaaggaagctcataccctgctgcgtccagggccctgcgactgggctgccactgcaagtccgctcccatgtcaaagtagttttccccctcggttccagccccagtcagagctctttgcaagctgtgcataagttctctgtcgctcagctcacgccttctgctggcgctcactgcgcggtgcatcctgtcgttgcggtacactcccagatcgtcactcaaggtcagcaccttgagagtcatgcgcatataaaacccatctatcttcacctccttgtctataggtacgtatggggttttgtagatcttgcgagcgtagtgcttgcccaggctcaagaccgagtagttaatagcagccaccttctcagctagacccaggctacgttcttgcacgattatactttgcagaatattgataagatcatacaaccatctcccctcgggctcagtaatgttcaacagcgcctccctaaatgcctcattgtctctactatgttgcaccaccagaaacagctgagcggttagaggtttgctggtggggttctgggtaatggcttccatcaggtcccacaggtgcatcagacccagtgtcacttcctcgcgggcaatcagggtgcgcacatggttgttgaaagatttttgaaagttgcgctcctccttcacggtctgctcgtaagctgatactaggttggccgcggccacatgtgccctagcaggacttattcctgtcacttcatcgacttcaaaatcatcatcacgcagcacccgtcttcggtccagaccgtgacgcagttcgcgacccgcgttaaagcgggaagctcgcatttcctcaggctcctcgccgctcctgtccctgaacaggttctgctggggcacgtacgcctcgcgagagtcctttttcagttgcacccgcgggtgccgctcgggcgatggtgcgcccaggcgcgccagtccctcgccctcttccaagtccagatcataggcgggctgccccgcgccgctgacggctgcagccgcagtagttacaggagcaggaagagccttttgtggctgttgttgtagctgctgctgagaagggggctgttgctgggggcgcatctgtcgcagcacgggatgcatctgggcaacaaaaaaacaaaaaaagagggctcgctcccgtaaactggagaagtcggctggcggggtcttagaaatgacgaggctgccaaaccctcgcttgtcgcggaaaccggccgatccggcgcgctaagactcgaaccggggcacaccgcaacgcaaccctggcgattgattctccagactacgggcgcgagccactcccagccccgagaactgagtgttctaaagcttgacgcagcattggctcccatccaggaaaaagccaaaaaaaaaaaaacgacccgcctccgtatcctggaggttttgtgcaggcctgggtcgagacgggagtgccagtaccacgttagctgcggctccagcctgatccgagattcgaaccggggtacacgcgcagcccaacccgttcgcttagcctccaggccacggagacgagccgctgaccgctttcgtttttgcccgtatgtctagagcatcaacgactgtgcacgtctcacgggccaaaccgtgcctaccatgaactacttcatgccgctgcgcaacatctggaaccgcgtacgcgagttcccgcgggcatccaccaccgcctccggtatcacctggatgtccaggtacatctacggttatcaccgcctcatgctggaagacctcgcccctggcgccccggctacagagcgatggcccctataccgccagccgccgccgcactttctcatcggctaccagtacctggtgcgcacctgtaacgattacatctttgacacccgcgcatactcgcgccttaagtataccgagcttgtgcgccctgggcaccagacagtcaactggtcagtcatggccaactgctcctacacaatcaacaccggggcttaccaccgcttcgtggactttgacgacttccaagccaccctcacccaggtgcagcaagccatcctcgcagaaagggttgtagcggacctggcacttgtccagcccatgcgcgggttcgggatcactcgcatgcatggcagagcgggcgaagaagaagtgcccgtggaacgactcatgcaagactactataaagatctggccagatgtcaggataatgcttggggaatggcccatcgcctgcgcatccaacaagccggacccaaagacctggtgctcctcgccaccatccgccgtctcaaaactgcctattttaatttcatcaccagcagcatcgtctcaccctccaaagaggaggaaggagaagaaagagagaaccccgaccgagcgtctagccgcccccgcccgcaagaaacagtgctcagcctaccttgcgattgcgactggttagacgctttcgtcgaaaggttttcagatcccgtggatcttgagacgatcaggtccttgcgcggagtacctacggggcaattaataaaatgcataatcagcgcggtgtccctgcccaacggagagcctcccagtcaccacttcagggagatgcgcggaggcgtcttcactctgagacccagggagaacggtcgtgccgtcaccgagaccatgcgccgccgccgcggagaggtcattgaaagattcatcgaccgtctgcccgtgcgccgccggcgtcgccgcgttccccctcctcctgcagccccacctgaagaggaagagatgttagtggaagaagaagagattgaggaagaaatcccaggggctttcgagctcgaggtgcgcaccaccatcgccgaactcatccgtcttttggaagaagagttgaccgtgtccgcgcgtaactcccagtttttcaactttgccgtggacttctacgaggccatggagcgcttggaagcgctgggcgatgtcagcgagatgccgctgagacgatggatcatgtatttcttcgtcaccgagcacatcgccaccacactcaactaccttttccagcgcctatgcaactatgcggtcttcacccgccacgtggagctcaacctcgcccaggtggtcatgcgcgcgagagatcccgtgggggctgtggtctacagccgcgtctggaacgaggcgggcatgaatgcattctctcaactcattgggcgtatctccaacgacctcgcggccaccgtcgagagagcgggccgcggagatcttcaagaggaagagatcgagcagttcatggccgagatcgcctaccaggacaactctggcgacgtgcaagaaatccttaggcaagccgccgtcaacgataccgagattgattctgttgaactctctttcaggttcaagctcacggggccggtagctttcacccagaggcgtcagatccaggatgtcaaccgccgcgtcgtggcgcatgcgagtcttctgagggcgcagtaccagaacctacccgcgcgcggcgccgacgtaccactgccggccatgccgccgggtcccgaaccgcccctgccgcccggtgcgcgccctcgacaccgcttctaaacatgcaagaagcaacagagccaccgccgcccaaaaggaaaaacaagggcacggtggtagcgcccaaggggcacggaaccctgcaagccatcgacatctccaccaacggacccgtggagatcaagtaccatctgaacctccctcacgccctcgaaaagatcatgcaagtcaatctcctgacactgcctactaacctgactccgcagcgtctcaggaccctggacagctccggcctgcgcgctctcgtcctcgagctccgcccctgccgcgccgaggtctggacttgcctcccgcgagggctcgtcagcatgaccaccatcgagacagaagatggtcatgccgatgcagacaacatagtagagcgcgaggtacaatcgccaggcctcaattttccactgaaatttctcgtcaaaggaagtcaggtacaactcattcatgaggtgcatcccgtgaatcgatgcgagtactgcggccgtctgtacaagcacaagcatgaatgctcggcgcgtcgcagggagttctacttccatcacatcaacagccattcctccaactggtggcaggagatccagttcttcccgattggctctcatcctcgcacagaaaggctcttcctcacctacgatgtggaaacctacacctggatggggtcctttggcaagcagctaatccccttcatgctggtcatgaaactctctggagaccagcggctcgtcaacatcgcctatgacctggccataaaactcaagtgggatcgctggcggcaggacccccaaaccttctattgcgtcaccccagaaaagatggcagtcgggcagcattttcgtcagtaccgggaccagttacaaacagcactggcagtggacctctggtcctccttcctcaaagcgaaccctcacgtgcacgaatgggccctcgaacactatgctctcactgaccctacagacctcacttttgaagaactcaagaagctgcctcatgtcaggggcacccctcgattcttagaactgtacatagtggggcacaacatcaatggctttgatgagatcgtcttggccgctcaggttatcaataaccgagcagaggtccctcagcctttcagaatcacccgaaatttcatgcccagggccggcaagatcctcttcaatgatgttactttcgctttgcccaaccccgcctacaagaagcgggtggacttccaactctgggaacagggggcctgtgatgacatcgacttcaagtatcaattcctcaaagtcatggtcagggacacttttgccctcactcatacctcgctgcgcaatgcagcccaagcatactctctcccagtggagaagggatgctgtccctacaaggcagtcaatcagttctacatgttgggctcttaccgtgcagaaaaagacgggtttcccctcgaagagtactggaaggatcgcgaagaataccttctcaaccgcgagctgtgggaaaagaaaagccaaccgcgttatgacatcatccaggaaactctcgactactgtgccctggacgtactcgtcaccgccgagctggtagccaagctgcaagagtcatatgcccacttcataagggactctgtaggcctacctcatgcccattttaacatattccagagacctactatctcttccaattcccatgccatctttcgccagatcgtttacagggcggaaaaacccaaccgcaccaatctgggcccgggtcttctcgccccctcacatgaactctatgactatgtgcgagcaagcatcagaggggggcgctgttatcccacttacatcggcatcctcgaagagcccctctatgtctacgatatctgtggcatgtatgcctccgcgctcacccaccccatgccctggggcacccctcttaacccctacgagcgcgcgctggcagttcgagaatggcagatgaccttggatgatcccgccaccatcagctattttgacaaagatttgctaccgggaatatttaccatagatgcggacccccctgatgagttcatgctagaccccctcccccctttctgttcaagaaaaggaggtcgactctgctggaccaatgagcccctccgaggcgaggtagccaccagtgtggatctgataaccctgcacaataggggatggcgagtcagaatagttccggatgaactgacaaccatcttccctgaatggaaatgtgtggcgcgcgagtacgtccagcttaacatcgccgccaaggagcgcgcggacaaggaaaagaaccaaaccatgcgctccatcgccaagcttctatccaatgccctctatggatcatttgccaccaagctggataacaagaagattgtgttttctgaccagatggacgagagtcttatgaaaggcatctctgctggtactgtcaatatcaaatcctcctcgttcctagaaactgacaacctgagtgcagaggtcatgcccgccttcgagagagaatacctaccccaacagctggcgctcctggacagtgatccggaagacagtgaggacgaacagaggcccgcccacttttatacccccccggcggggacccctggtcacgtggcctacacttacaagccaatcacattcttggatgtggaggagggggacatgtgtttacataccgtagagaaggtggaccccctggttgacaacgaccgctacccctcccacgtggcctcctttgtgctggcctggacacgcgcttttgtatcagagtgggctgggttcctctacgaagaggaccgaggcactccgctcgaggacaggcccataaagtcggtctacggggacacggacagcctctttgtcacccagcggggacacgaactcatggaaaccaaaggtaagaaacgcatcaaaaaacatggcggaaaacttgtttttgaccccgatgagccggatctgacctggctcgtggagtgcgaaaccgtctgcgcctcctgcggtgcggatgcatactcccccgaatccattttcctcgcgcccaagctgtatgccctcaaatgtatctactgccccgcctgccataaaacttccaaaggtaagctccgtgccaaaggccacgcggccgaggcgctcaactacgaactcatggtaaactgctacctggccgacatgcagggcgccgatcggcagcggttctcgaccagcaggatgagtctgaagcgcaccctcgcaagcgcccaaccaggcgcgcaccccttcaccgtgacggaaacaaccctgactcggacgctgcgaccatggaaggatcggaccctagcagcgctggacgctcatcgtctgattccctactccaggagccgtcccaacccgcgaaacgaggaggtctgctggatcgagatgccatagagcacatcaccgagctctgggaccggctcgagctcttgcaacagactctttccaaaatgcccatggctgacgggctgaaaccgttgaaaaacttctcctcgctccaggagcttctatcccttgggggagagcgcctcctaacggacttggtgcgggaaaatatccatgtaagggaaatgatgaacgaagtggcccccctgctccgggaggacggcagctgtcgctccctaaactaccatctgcaacccgtaattggggtcatttacggtcccactgggtgcggcaagtctcagctgcttaggaatttgctctcatcccagttaatcaccccggctccagaaacggtattttttatagccccgcaggtggacatgatccccccctcggaactgaaagcctgggaaatgcaaatatgtgagggaaactatgctcccgggccagagggaactttcatcccccaatctggcaccctccgcccaaagtttattaaaatggcttatgatgacctgactcaggagcataactatgatgtttcagacccccggaacgtgttcgcccgtgccgctgcccacggccccatcgctatcattatggatgagtgcatggagaatctggggggtcacaaaggcgtctccaaattttttcatgcttttccctctaagctgcatgataaatttcccaagtgcaccggatacactgtcttggtggttctgcacaatatgaacccgagacgggatctaggcggcaacattgccaacctcaagatccagtccaaaatgcatataatttcccccaggatgcacccgtcccagctcaacagatttgtaaacacctacactaagggcctccccgttgcaattagtctgctcctaaaagatattgtgcaacaccatgcactccgaccttgctatgactgggtgatttataacactaccccggagcaagaggctcttcaatggagctatctccacccccgagacggactaatgcccatgtatctaaacattcaatcccacctttacagggtactggaaaagatccaccgagttctcaatgatcgagaccgatggtccagggcataccgcgcgcgaaaaaccaaataaacattcatttgtttttataaca

SEQ ID NO: 232 - DNA, 4121 bp, Human adenovirus
  misc_feature 1..4121: note = Human adenovirus 50, Ad50 E3
  source 1..4121: mol_type = genomic DNA
tataaaacgcctggtgatcagaggccgaggtatccagctcaacgacgagtcggttagctcttcgcttggtctgcgaccagacggagtcttccagatcgccggctgtgggagatcttccttcactcctcgtcaggctgtgctgactttggagagttcgtcctcgcagccccgctcgggcggcatcggaactctccagtttgtggaggagtttactccctctgtctacttcaaccccttctccggctctcctggccagtacccggacgagttcataccgaacttcgacgcaatcagcgagtcagtggatggctatgattgatgtctaatggtggcgcggctgagctagctcgactgcgacacctagaccactgccgccgctttcgctgtttcgcccgggaactcaccgagttcatctacttcgaactctccgaggagcaccctcagggtccggcccacggagtgcggattaccatcgaagggggaatagactctcgcctgcatcgcatcttctcccagcggcccgtgctgattgagcgcgaccagggaaatacaaccatctccatctactgcatctgtaaccaccccggattgcatgaaagcctttgctgtcttgtttgtgctgagtttaataaaaactgagttaagaccttcctacggactaccgcttcttcaatcaggactttacaacaccaaccagatcttccagaagacccagacccttcctcctctgatccaggactctaactctaccttaccagcaccctccactactaaccttcccgaaactaacaagcttggatctcatctgcaacaccgcctttcacgaagccttctttctgccaatactaccactcccaaaaccggaggtgagctccgcggtcttcctactgacgacccctgggtggtagcgggttttgtaacgttaggattagttgcgggtgggcttgtgctaatcctttgctacctatacacaccttgctgtgcatatttagtcatattgtgctgttggtttaagaaatgggggccatactagtcgtgcttgctttactttcgcttttgggtctgggctctgctaatctcaatcctcttgatcacaatccatgtctagacttcgacccagaaaattgcacacttacttttgcacccgacacaagccgtctctgtggagttcttattaagtgcggatgggactgcaggtccgttgaaattacacataataacaaaacatggaacaataccttatccaccacatgggagccaggagttcccgagtggtatactgtctctgtccgaggtcctgacggttccattcgcattagtaacaacactttcattttttctgaaatgtgcgatctggccatgtttatgagcaaacagtatgacctatggcctcctagcaaagagaacattgtggcattttccattgcttattgcttggtaacatgcatcatcactgctatcatttgtgtgtgcatacacttgcttatagttattcgccctagacaaagcaatgaggaaaaagagaaaatgccttaacctttttcctcataccttttctttacagcatggcttctgttacagctctaattattgccagcattgtcactgtcgctcacgggcaaacaattgtccatattaccttaggacataatcacactcttgtagggcccccaattacttcagaggttatttggaccaaacttggaagtgttgattattttgatataatttgcaacaaaactgaaccaatatttgtaatctgtaacagacaaaatctcacgttaattaatgttagcaaaatttataacggttactattatggttatgatagatccagtagccaatataaaaattacttagttcgcataactcagcccaaatcaacagtgccaactatgacaataattaaaatggctaataaagcattagaaaattttacattaccaacaacgcccaatgaaaaaaacattccaaattcaatgattgcaattattgcggcggtggcattgggaatggcactaataataatatgcatgttcctatatgcttgttgctataaaaagtttcaacataaacaggatccactactaaattttaacatttaattttttatacagatgatttccactacaatttttatcattactagccttgcagctgtaacttatggccgttcacacctaactgtacctgttggctcaacatgtacactacaaggaccccaagaaggctatgtcacttggtggagaatatatgataatggagggttcgctagaccatgtgatcagcctggtacaaaattttcatgcaacggaagagacttgaccattattaacataacattaaatgagcaaggcttctattatggaaccaactataaaaatagtttagattacaacattattgtagtgccagccaccacttctgctccccgcaaatccactttctctagcagcagtgccaaagcaagcacaattcctaaaacagcttctgctatgttaaagcttcgaaaaatcgctttaagtaattccacagcagctcccaatacaattcctaaatcaacaattggcatcattactgccgtggtagtgggattaatgattatatttttgtgcataatgtactacgcctgctgctatagaaaacatgaacaaaaaggtgatgcattactaaattttgatatttaattttttatagaattatgatattgtttcaatccaatgccactaacactatcaatgtgcagactactttaaaacatgacatggaaaaccacactacctcctatgcatacacaaatattcagcctaaatacgctatgcaactagaaatcaccatactaattgtaattggaattcttatactatctgttattctttattttatattctgccgtcaaatacccaatgttcatagaaattctaaaagacgtcccatctattctcctatgattagtcgtccccatatggctctgaatgaaatctaagatctttttttttcttttacagtatggtgaacatcaatcatgattcctagaaatttcttcttcaccatactcatctgtgctttcaatgtctgtgctactttcacagcagtagccactgcaagcccagactgtataggaccatttgcttcctatgcactttttgcctttgttacttgcatctgcgtgtgtagcatagtctgcctggttattaattttttccaactggtagactggatctttgtgcgaattgcctacctacgtcaccatcccgaataccgcaatcaaaatgttgcggcacttcttaggcttatttaaaaccatgcaggctatgctaccagttattttaattctgctactaccctgcattgccctaccttccaccgccactcgcgctacacctgaacaacttagaaaatgcaaatttcaacaaccatggtcatttcttgattgctaccatgaaaaatctgattttcccacatactggatagtgattgttggaataattaacatactttcatgtacctttttctcaatcacaatataccccacatttaattttgggtggaattctcccaatgcactgggttacccacaagagctagatgaacatatcccactacaacacatacaacaaccactagcattggtagagtatgaaaatgagccacaaccttcactgcctcctgctattagttacttcaacctaaccggcggagatgactgaaatactcaccacctccaattccgccgaggatctgcttgatatggacggccgcgcctcagaacagcgactcgcccaactacgcatccgccagcagcaggaacgcgtgaccaaagagctcagagatgtcatccaaattcaccaatgcaaaaaaggcatattttgtttggtaaaacaagccaagatatcctacgagatcaccgctactgaccatcgcctctcttacgaacttggcccccaacgacaaaaatttacatgcatggtgggaatcaaccctatagttatcacccagcaaagtggagatactaagggttgcattcactgctcttgcgattccaccgagtgcacctacaccctgctgaagaccctatgcggcctaagagacctgctacccatgaattaaaaattaataaa

SEQ ID NO: 233 - DNA, 972 bp, Human adenovirus
  misc_feature 1..972: note = Human adenovirus 50, Ad50 fiber
  source 1..972: mol_type = genomic DNA
atgaccaagagagtccggctcagtgattccttcaaccctgtctacccctatgaagacgaaagcacctcccaacacccctttataaacccagggtttatttccccaaatggctttacacaaagcccagacggagttcttactttaaattgtttaaccccactaacaaccacaggcgggcctttacagttaaaagtgggagggggacttatagtggatgacactgatgggaccttacaagaaaacatacgtgttacagcacccattactaaaaataatcattctgtagaactatccattggaaatggattagaaacacaaaacaataaactatgtgccaaattgggaaatgggttaaaatttaacaacggtgacatttgtataaaggatagtattaacaccttatggactggaataaagcctccacctaactgtcaaatagtggaaaacactgatacaaacgatggcaaacttactttagtattagtaaaaaacggaggacttgttaatggctacgtatctctagttggtgtatcagacactgtgaaccaaatgttcacacaaaagtcagcaaccatacaattaagattatatttcgactcttctggaaatctattaactgatgaatcaaacttaaaaattccacttaaaaataaatcttctacagcaaccagtgaagctgcaaccagcagcaaagcctttatgccaagtactacagcttatccctttaacaccactactagggatagtgaaaactatattcatggaatatgttactatatgactagttatgatagaagtctagttcccttaaacatttctataatgctaaacagccgtacgatttcttccaatgttgcctatgccatacaatttgaatggaatctaaatgcaaaagaatctccagaaagcaacatagctacgctgaccacatccccctttttcttttcttatattagagaagacgacaactaa

SEQ ID NO: 234 - DNA, 126 bp, Human adenovirus
  misc_feature 1..126: note = Human adenovirus 50, Ad50 fiber tail
  source 1..126: mol_type = genomic DNA
atgaccaagagagtccggctcagtgattccttcaaccctgtctacccctatgaagacgaaagcacctcccaacacccctttataaacccagggtttatttccccaaatggctttacacaaagccca

SEQ ID NO: 235 - DNA, 273 bp, Human adenovirus
  misc_feature 1..273: note = Human adenovirus 50, Ad50 fiber shaft
  source 1..273: mol_type = genomic DNA
gacggagttcttactttaaattgtttaaccccactaacaaccacaggcgggcctttacagttaaaagtgggagggggacttatagtggatgacactgatgggaccttacaagaaaacatacgtgttacagcacccattactaaaaataatcattctgtagaactatccattggaaatggattagaaacacaaaacaataaactatgtgccaaattgggaaatgggttaaaatttaacaacggtgacatttgtataaaggatagtattaacacc

SEQ ID NO: 236 - DNA, 570 bp, Human adenovirus
  misc_feature 1..570: note = Human adenovirus 50, Ad50 fiber knob
  source 1..570: mol_type = genomic DNA
ttatggactggaataaagcctccacctaactgtcaaatagtggaaaacactgatacaaacgatggcaaacttactttagtattagtaaaaaacggaggacttgttaatggctacgtatctctagttggtgtatcagacactgtgaaccaaatgttcacacaaaagtcagcaaccatacaattaagattatatttcgactcttctggaaatctattaactgatgaatcaaacttaaaaattccacttaaaaataaatcttctacagcaaccagtgaagctgcaaccagcagcaaagcctttatgccaagtactacagcttatccctttaacaccactactagggatagtgaaaactatattcatggaatatgttactatatgactagttatgatagaagtctagttcccttaaacatttctataatgctaaacagccgtacgatttcttccaatgttgcctatgccatacaatttgaatggaatctaaatgcaaaagaatctccagaaagcaacatagctacgctgaccacatccccctttttcttttcttatattagagaagacgacaac

SEQ ID NO: 237 - DNA, 1683 bp, Human adenovirus
  misc_feature 1..1683: note = Human adenovirus 50, Ad50 penton
  source 1..1683: mol_type = genomic DNA
atgaggcgaaccgtgctaggcggagcggtggtgtatccggagggtcctcctccttcgtacgagagcgtgatgcagcaggcggcggcggcggcgatgcagccaccactggaggctccctttgtaccccctcggtacctggcacctacggaggggagaaacagcattcgttactcggagctggcaccattgtatgataccacccggttgtatttggtggacaacaagtccgcggacatcgcctcactgaactatcagaacgaccacagcaacttcctcaccacggtggtgcaaaacaatgactttacccccacggaggccagcacccagaccatcaactttgacgagcggtcgcgatggggcggtcagctgaagactatcatgcacaccaacatgcccaacgtgaacgagtacatgtttagcaacaagttcaaagctcgggtgatggtgtctagaaaggctcctgaaggtgtcacagtagatgacaattatgatcacaagcaggatattttggaatatgagtggtttgagtttactctaccggaagggaacttctcagccacaatgaccattgacctaatgaacaatgccatcattgataattaccttgaagtgggcagacagaatggagtgttggagagtgacattggtgttaaatttgacaccaggaactttagactgggttgggatccggaaactaagttgattatgcctggggtttacacctatgaggcattccatcctgacattgtattgttgcctggttgcggagttgactttactgaaagtcgccttagtaacttgcttggtatcaggaaaagacacccattccaggagggttttaagatcttgtatgaggatcttgaagggggtaatatcccggccctgttggatgtagaagcctataagaacagtaagaaagaacgagaagccaaaacagaagccgctaaagctgctgctattgctaaagccaacatagttgtcagcgaccctgtaagggtggctaatgccgaagaagtcagaggagacaactatacagcttcatctgttgcaactgaagaatcgctattggctgctgtggccgaaactacagagaccaaactcactattaaacctgtagaaaaagacagcaagagtagaagttacaatgtcttggaagataaagtgaatacagcctaccgcagctggtacctgtcctacaactatggtgaccctgaaaaaggagtccgttcctggacactgctcaccacctcggatgtcacctgtggagcagagcaggtgtactggtcgctcccagacatgatgcaggaccctgtcacattccgttccacgagacaagtcagcaactatccagtggtaggtgcagagctcatgccggtcttctcaaagagtttctacaacgagcaagccgtgtactcccagcagcttcgccagtccacctcgctcacgcacgtcttcaaccgcttccctgagaaccagatcctcatccgcccgccagcgcccaccattaccaccgtcagtgaaaacgttcctgctctcacagatcacgggaccctgccgttgcgcagcagtatccggggagtccagcgcgtgaccgttactgacgccagacgccgcacctgcccctacgtctacaaggccctgggcatagtcgcgccgcgcgtcctttcaagccgcactttctaa

SEQ ID NO: 238 - DNA, 2823 bp, Human adenovirus
  misc_feature 1..2823: note = Human adenovirus 50, Ad50 hexon
  source 1..2823: mol_type = genomic DNA
atggccaccccatcgatgctgccccagtgggcatacatgcacatcgccggacaggatgcttcggagtacctgagtccgggtctggtgcagttcgcccgcgccacagacacctacttcaatctggggaacaagtttaggaaccccaccgtggcgcccacccatgatgtgaccaccgaccgcagtcagcggctgatgctgcgctttgtgcccgttgaccgggaagacaatacctacgcatacaaagttcgatacaccttggctgtgggcgacaacagagtgctggatatggccagcactttctttgacattcggggtgtgttggatagaggtcctagcttcaagccatattctggcactgcttacaactcattggcccctaagggcgctcccaatacatctcagtggcttaataagggagatgaagaggatggggaagacgaccaacaagctacatacacttttggcaatgcgccagtaaaagccgaagctgaaattacaaaagaaggactgccaataggtttggaagttccatctgaaggtggccctaaacccatttatgctgataaactgtatcagccagaacctcaggtgggagaggaatcttggactgatacggatggcacagatgaaaaatatggaggcagagcacttaaacctgaaactaaaatgaaaccctgctacgggtctttcgctaaacctactaatgttaaaggcgggcaggcaaaagtgaagaaagaagaagaaggcaaggttgaatatgacattgacatgaactttttcgacctaagatcacaaatgactggcctcaagcctaaaattgtaatgtatgcagaaaatgtggatctagaaactcctgacactcatgtggtgtacaaacctggagcttcagatgctagctctcatgcaaaccttggtcaacagtccatgcccaatagacctaactatattggcttcagggacaacttcatcggactcatgtactacaacagtactggcaacatgggagtgctggctggacaagcgtctcagctaaatgcagtggttgacttgcaagacagaaacacagaattgtcatatcaactcttgcttgattctctgggggacagaaccagatatttcagtatgtggaatcaagcagtggatagctatgacccagatgtgcgtgttattgagaaccatggtgtggaagatgaacttcctaactattgttttccattggatggtgtaggtccgcgaatagacagttacaagggaattgagacaaatggtgatgaaaccactacttggaaagatttagagccaaagggcataagtgaaattgctaagggaaatccgtttgccatggaaattaacctccaagctaatctctggagaagttttctttattccaatgtggctctgtatctcccagactcctacaaatacaccccagccaatgtcactcttccaactaacaccaacacttatgactacatgaatgggcgggtggttcccccatccctggtggatacctacgtaaacattggcgccagatggtctttggatgccatggacaatgtcaacccctttaaccatcaccgcaacgctggcctgcgataccggtccatgcttttgggcaatggtcgttacgtgcctttccacattcaagtgcctcagaaattctttgctgtgaagaacctgctgcttctacccggttcttacacctacgagtggaacttcagaaaggatgtgaacatggtcctgcagagttcccttggtaatgatctccgggtcgatggtgccagcataagttttaccagcatcaatctctatgccaccttcttccccatggcccacaacactgcctccacccttgaagccatgctgcgcaatgacaccaatgatcaatcattcaatgactacctttctgctgccaacatgctctaccccatcccggccaacgctaccaacgttcccatctccattccctctcgcaactgggccgccttcagaggctggtccttcaccagactcaaaaccaaggagactccctctttgggatcagggttcgatccctactttgtttactctggttctataccctacctggatggtaccttctaccttaaccacactttcaagaaagtctccatcatgtttgactcttcagtgagctggcctggtaatgacagattgctaagtccaaatgagttcgaaatcaagcgcacagttgatggggaaggctacaatgtggcccaatgtaacatgaccaaagactggttcctggtccagatgcttgccaactacaacattggataccagggcttctacgttcctgagggttacaaggatcgcatgtactccttcttcagaaacttccagcccatgagtagacaggtggttgatgagattaactacaaagactataaagctgtcgccgtaccctaccagcataataactctggctttgtgggttacatggctcctaccatgcgtcagggtcaagcgtaccctgctaactacccataccccctaattggaaccactgcagtaaccagtgtcacccagaaaaaattcctgtgcgacaggaccatgtggcgcatcccattctctagcaacttcatgtccatgggtgcccttacagacctgggacagaacttgctgtatgccaactcggcccatgcgctggacatgacttttgaggtggatcccatggatgagcccaccctgctttatcttcttttcgaagtcttcgacgtggtcagagtgcaccagccacaccgcggcgtcatcgaggccgtctacctgcgcacaccgttctcggccggcaacgccaccacataa

SEQ ID NO: 239 - protein, 323 aa, Human adenovirus; identical to SEQ ID NO: 82
  REGION 1..323: note = misc_feature - Human adenovirus 50, Ad50 fiber

SEQ ID NO: 240 - protein, 91 aa, Human adenovirus
  REGION 1..91: note = misc_feature - Human adenovirus 50, Ad50 fiber shaft
DGVLTLNCLTPLTTTGGPLQLKVGGGLIVDDTDGTLQENIRVTAPITKNNHSVELSIGNGLETQNNKLCAKLGNGLKFNNGDICIKDSINT

SEQ ID NO: 241 - protein, 190 aa, Human adenovirus; identical to SEQ ID NO: 205
  REGION 1..190: note = misc_feature - Human adenovirus 50, Ad50 fiber knob

SEQ ID NO: 242 - protein, 560 aa, Human adenovirus; identical to SEQ ID NO: 83
  REGION 1..560: note = misc_feature - Human adenovirus 50, Ad50 penton

SEQ ID NO: 243 - protein, 940 aa, Human adenovirus; identical to SEQ ID NO: 84
  REGION 1..940: note = misc_feature - Human adenovirus 50, Ad50 hexon

SEQ ID NO: 244 - protein, 42 aa, Human adenovirus; identical to SEQ ID NO: 136
  REGION 1..42: note = misc_feature - Human adenovirus 50, Ad50 fiber tail

SEQ ID NO: 245 - DNA, 137 bp, Human adenovirus
  misc_feature 1..137: note = Human adenovirus 35, Ad35 5? (left) ITR
  source 1..137: mol_type = genomic DNA
catcatcaataatataccttatagatggaatggtgccaatatgtaaatgaggtgattttaaaaagtgtgggccgtgtggtgattggctgtggggttaacggttaaaaggggcggcgcggccgtgggaaaatgacgtt

SEQ ID NO: 246 - DNA, 137 bp, Human adenovirus
  misc_feature 1..137: note = Human adenovirus 35, Ad35 3? (right) ITR
  source 1..137: mol_type = genomic DNA
aacgtcattttcccacggccgcgccgccccttttaaccgttaaccccacagccaatcaccacacggcccacactttttaaaatcacctcatttacatattggcaccattccatctataaggtatattattgatgatg

SEQ ID NO: 247 - DNA, 342 bp, Human adenovirus
  misc_feature 1..342: note = Human adenovirus 35, Ad35 Packaging Sequence
  source 1..342: mol_type = genomic DNA
ttatgggggtggagtttttttgcaagttgtcgcgggaaatgttacgcataaaaaggcttcttttctcacggaactacttagttttcccacggtatttaacaggaaatgaggtagttttgaccggatgcaagtgaaaattgctgattttcgcgcgaaaactgaatgaggaagtgtttttctgaataatgtggtatttatggcagggtggagtatttgttcagggccaggtagactttgacccattacgtggaggtttcgattaccgtgttttttacctgaatttccgcgtaccgtgtcaaagtcttctgtttttacgtaggtgtcagctgatcgctagggtat

SEQ ID NO: 248 - DNA, 2921 bp, Human adenovirus
  misc_feature 1..2921: note = Human adenovirus 35, Ad35 E1
  source 1..2921: mol_type = genomic DNA
ttatacctcagggtttgtgtcaagaggccactcttgagtgccagcgagaagagttttctcctctgcgccggcagtttaataataaaaaaatgagagatttgcgatttctgcctcaggaaataatctctgctgagactggaaatgaaatattggagcttgtggtgcacgccctgatgggagacgatccggagccacctgtgcagctttttgagcctcctacgcttcaggaactgtatgatttagaggtagagggatcggaggattctaatgaggaagctgtgaatggcttttttaccgattctatgcttttagctgctaatgaaggattagaattagatccgcctttggacactttcaatactccaggggtgattgtggaaagcggtacaggtgtaagaaaattacctgatttgagttccgtggactgtgatttgcactgctatgaagacgggtttcctccgagtgatgaggaggaccatgaaaaggagcagtccatgcagactgcagcgggtgagggagtgaaggctgccaatgttggttttcagttggattgcccggagcttcctggacatggctgtaagtcttgtgaatttcacaggaaaaatactggagtaaaggaactgttatgttcgctttgttatatgagaacgcactgccactttatttacagtaagtgtgtttaagttaaaatttaaaggaatatgctgtttttcacatgtatattgagtgtgagttttgtgcttcttattataggtcctgtgtctgatgctgatgaatcaccatctcctgattctactacctcacctcctgatattcaagcacctgttcctgtggacgtgcgcaagcccattcctgtgaagcttaagcctgggaaacgtccagcagtggagaaacttgaggacttgttacagggtggggacggacctttggacttgagtacacggaaacgtccaagacaataagtgttccatatccgtgtttacttaaggtgacgtcaatatttgtgtgagagtgcaatgtaataaaaatatgttaactgttcactggtttttattgctttttgggcggggactcaggtatataagtagaagcagacctgtgtggttagctcataggagctggctttcatccatggaggtttgggccattttggaagaccttaggaagactaggcaactgttagagagcgcttcggacggagtctccggtttttggagattctggttcgctagtgaattagctagggtagtttttaggataaaacaggactataaacaagaatttgaaaagttgttggtagattgcccaggactttttgaagctcttaatttgggccatcaggttcactttaaagaaaaagttttatcagttttagacttttcaaccccaggtagaactgctgctgctgtggcttttcttacttttatattagataaatggatcccgcagactcatttcagcaggggatacgttttggatttcatagccacagcattgtggagaacatggaaggttcgcaagatgaggacaatcttaggttactggccagtgcagcctttgggtgtagcgggaatcctgaggcatccaccggtcatgccagcggttctggaggaggaacagcaagaggacaacccgagagccggcctggaccctccagtggaggaggcggagtagctgacttgtctcctgaactgcaacgggtgcttactggatctacgtccactggacgggataggggcgttaagagggagagggcatccagtggtactgatgctagatctgagttggctttaagtttaatgagtcgcagacgtcctgaaaccatttggtggcatgaggttcagaaagagggaagggatgaagtttctgtattgcaggagaaatattcactggaacaggtgaaaacatgttggttggagccagaggatgattgggaggtggccattaaaaattatgccaagatagctttgaggcctgataaacagtataagatcagtagacggattaatatccggaatgcttgttacatatctggaaatggggctgaggtggtaatagatactcaagacaagacagttattagatgctgcatgatggatatgtggcctggagtagtcggtatggaagcagtcacttttgtaaatgttaagtttaggggagatggttataatggaatagtgtttatggccaataccaaacttatattgcatggttgtagcttttttggtttcaacaatacctgtgtagatgcctggggacaggttagtgtacgggggtgtagtttctatgcgtgttggattgccacagctggcagaaccaagagtcaattgtctctgaagaaatgcatattccaaagatgtaacctgggcattctgaatgaaggcgaagcaagggtccgtcactgcgcttctacagatactggatgttttattttaattaagggaaatgccagcgtaaagcataacatgatttgtggtgcttccgatgagaggccttatcaaatgctcacttgtgctggtgggcattgtaatatgctggctactgtgcatattgtttcccatcaacgcaaaaaatggcctgtttttgatcacaatgtgttgaccaagtgcaccatgcatgcaggtgggcgtagaggaatgtttatgccttaccagtgtaacatgaatcatgtgaaagtgttgttggaaccagatgccttttccagaatgagcctaacaggaatctttgacatgaacacgcaaatctggaagatcctgaggtatgatgatacgagatcgagggtgcgcgcatgcgaatgcggaggcaagcatgccaggttccagccggtgtgtgtagatgtgaccgaagatctcagaccggatcatttggttattgcccgcactggagcagagttcggatccagtggagaagaaactgactaa

SEQ ID NO: 249 - DNA, 19450 bp, Human adenovirus
  misc_feature 1..19450: note = Human adenovirus 35, Ad35 E2
  source 1..19450: mol_type = genomic DNA
ttatttcatttttcgcgcacggtatgccctggaccaccgatctcgatcattgagaactcggtggattttttccagaatcctatagaggtgggattgaatgtttagatacatgggcattaggccgtctttggggtggagatagctccattgaagggattcatgctccggggtagtgttgtaaatcacccagtcataacaaggtcgcagtgcatggtgttgcacaatatcttttagaagtaggctgattgccacagataagcccttggtgtaggtgtttacaaaccggttgagctgggaggggtgcattcgaggtgaaattatgtgcattttggattggatttttaagttggcaatattgccgccaagatcccgtcttgggttcatgttatgaaggactaccaagacggtgtatccggtacatttaggaaatttatcgtgcagcttggatggaaaagcgtggaaaaatttggagacacccttgtgtcctccgagattttccatgcactcatccatgataatagcaatggggccgtgggcagcggcgcgggcaaacacgttccgtgggtctgacacatcatagttatgttcctgagttaaatcatcataagccattttaatgaatttggggcggagcgtaccagattggggtatgaatgttccttcgggccccggagcatagttcccctcacagatttgcatttcccaagctttcagttctgagggtggaatcatgtccacctggggggctatgaagaacaccgtttcgggggcgggggtgattagttgggatgatagcaagtttctgagcaattgagatttgccacatccggtggggccataaataattccgattacaggttgcaggtggtagtttagggaacggcaactgccgtcttctcgaagcaagggggccacctcgttcatcatttcccttacatgcatattttcccgcaccaaatccattaggaggcgctctcctcctagtgatagaagttcttgtagtgaggaaaagtttttcagcggttttagaccgtcagccatgggcattttggaaagagtttgctgcaaaagttctagtctgttccacagttcagtgatgtgttctatggcatctcgatccagcagacctcctcgtttcgcgggtttggacggctcctggagtagggtatgagacgatgggcgtccagcgctgccagggttcggtccttccagggtctcagtgttcgagtcagggttgtttccgtcacagtgaaggggtgtgcgcctgcttgggcgcttgccagggtgcgcttcagactcattctgctggtggagaacttctgtcgcttggcgccctgtatgtcggccaagtagcagtttaccatgagttcgtagttgagcgcctcggctgcgtggcctttggcgcggagcttacctttggaagttttcttgcataccgggcagtataggcatttcagcgcatacagcttgggcgcaaggaaaatggattctggggagtatgcatccgcgccgcaggaggcgcaaacagtttcacattccaccagccaggttaaatccggttcattggggtcaaaaacaagttttccgccatattttttgatgcgtttcttacctttggtctccataagttcgtgtcctcgttgagtgacaaacaggctgtccgtatctccgtagactgattttacaggcctcttctccagtggagtgcctcggtcttcttcgtacaggaactctgaccactctgatacaaaggcgcgcgtccaggccagcacaaaggaggctatgtgggaggggtagcgatcgttgtcaaccagggggtccaccttttccaaagtatgcaaacacatgtcaccctcttcaacatccaggaatgtgattggcttgtaggtgtatttcacgtgacctggggtccccgctgggggggtataaaagggggcggttctttgctcttcctcactgtcttccggatcgctgtccaggaacgtcagctgttggggtaggtattccctctcgaaggcgggcatgacctctgcactcaggttgtcagtttctaagaacgaggaggatttgatattgacagtgccggttgagatgcctttcatgaggttttcgtccatttggtcagaaaacacaatttttttattgtcaagtttggtggcaaatgatccatacagggcgttggataaaagtttggcaatggatcgcatggtttggttcttttccttgtccgcgcgctctttggcggcgatgttgagttggacatactcgcgtgccaggcacttccattcggggaagatagttgttaattcatctggcacgattctcacttgccaccctcgattatgcaaggtaattaaatccacactggtggccacctcgcctcgaaggggttcattggtccaacagagcctacctcctttcctagaacagaaagggggaagtgggtctagcataagttcatcgggagggtctgcatccatggtaaagattcccggaagtaaatccttatcaaaatagctgatgggagtggggtcatctaaggccatttgccattctcgagctgccagtgcgcgctcatatgggttaaggggactgccccagggcatgggatgggtgagagcagaggcatacatgccacagatgtcatagacgtagatgggatcctcaaagatgcctatgtaggttggatagcatcgcccccctctgatacttgctcgcacatagtcatatagttcatgtgatggcgctagcagccccggacccaagttggtgcgattgggtttttctgttctgtagacgatctggcgaaagatggcgtgagaattggaagagatggtgggtctttgaaaaatgttgaaatgggcatgaggtagacctacagagtctctgacaaagtgggcataagattcttgaagcttggttaccagttcggcggtgacaagtacgtctagggcgcagtagtcaagtgtttcttgaatgatgtcataacctggttggtttttcttttcccacagttcgcggttgagaaggtattcttcgcgatccttccagtactcttctagcggaaacccgtctttgtctgcacggtaagatcctagcatgtagaactgattaactgccttgtaagggcagcagcccttctctacgggtagagagtatgcttgagcagcttttcgtagcgaagcgtgagtaagggcaaaggtgtctctgaccatgactttgagaaattggtatttgaagtccatgtcgtcacaggctccctgttcccagagttggaagtctacccgtttcttgtaggcggggttgggcaaagcgaaagtaacatcattgaagagaatcttaccggctctgggcataaaattgcgagtgatgcggaaaggctgtggtacttccgctcgattgttgatcacctgggcagctaggacgatttcgtcgaaaccgttgatgttgtgtcctacgatgtataattctatgaaacgcggcgtgcctctgacgtgaggtagcttactgagctcatcaaaggttaggtctgtggggtcagataaggcgtagtgttcgagagcccattcgtgcaggtgaggatttgcatgtaggaatgatgaccaaagatctaccgccagtgctgtttgtaactggtcccgatactgacgaaaatgccggccaattgccattttttctggagtgacacagtagaaggttctggggtcttgttgccatcgatcccacttgagtttaatggctagatcgtgggccatgttgacgagacgctcttctcctgagagtttcatgaccagcatgaaaggaactagttgtttgccaaaggatcccatccaggtgtaagtttccacatcgtaggtcaggaagagtctttctgtgcgaggatgagagccgatcgggaagaactggatttcctgccaccagttggaggattggctgttgatgtgatggaagtagaagtttctgcggcgcgccgagcattcgtgtttgtgcttgtacagacggccgcagtagtcgcagcgttgcacgggttgtatctcgtgaatgagctgtacctggcttcccttgacgagaaatttcagtgggaagccgaggcctggcgattgtatctcgtgctcttctatattcgctgtatcggcctgttcatcttctgtttcgatggtggtcatgctgacgagcccccgcgggaggcaagtccagacctcggcgcgggaggggcggagctgaaggacgagagcgcgcaggctggagctgtccagagtcctgagacgctgcggactcaggttagtaggtagggacagaagattaacttgcatgatcttttccagggcgtgcgggaggttcagatggtacttgatttccacaggttcgtttgtagagacgtcaatggcttgcagggttccgtgtcctttgggcgccactaccgtacctttgttttttcttttgatcggtggtggctctcttgcttcttgcatgctcagaagcggtgacggggacgcgcgccgggcggcagcggttgttccggacccgggggcatggctggtagtggcacgtcggcgccgcgcacgggcaggttctggtattgcgctctgagaagacttgcgtgcgccaccacgcgtcgattgacgtcttgtatctgacgtctctgggtgaaagctaccggccccgtgagcttgaacctgaaagagagttcaacagaatcaatttcggtatcgttaacggcagcttgtctcagtatttcttgtacgtcaccagagttgtcctggtaggcgatctccgccatgaactgctcgatttcttcctcctgaagatctccgcgacccgctctttcgacggtggccgcgaggtcattggagatacggcccatgagttgggagaatgcattcatgcccgcctcgttccagacgcggctgtaaaccacggccccctcggagtctcttgcgcgcatcaccacctgagcgaggttaagctccacgtgtctggttaagaccgcatagttgcataggcgctgaaaaaggtagttgagtgtggtggcaatgtgttcggcgacgaagaaatacatgatccatcgtctcagcggcatttcgctaacatcgcccagagcttccaagcgctccatggcctcgtagaagtccacggcaaaattaaaaaactgggagtttcgcgcggacacggtcaattcctcctcgagaagacggatgagttcggctatggtggcccgtacttcgcgttcgaaggctcccgggatctcttcttcctcttctatctcttcttccactaacatctcttcttcgtcttcaggcgggggcggagggggcacgcggcgacgtcgacggcgcacgggcaaacggtcgatgaatcgttcaatgacctctccgcggcggcggcgcatggtttcagtgacggcgcggccgttctcgcgcggtcgcagagtaaaaacaccgccgcgcatctccttaaagtggtgactgggaggttctccgtttgggagggagagggcgctgattatacattttattaattggcccgtagggactgcgcgcagagatctgatcgtgtcaagatccacgggatctgaaaacctttcgacgaaagcgtctaaccagtcacagtcacaaggtaggctgagtacggcttcttgtgggcgggggtggttatgtgttcggtctgggtcttctgtttcttcttcatctcgggaaggtgagacgatgctgctggtgatgaaattaaagtaggcagttctaagacggcggatggtggcgaggagcaccaggtctttgggtccggcttgctggatacgcaggcgattggccattccccaagcattatcctgacatctagcaagatctttgtagtagtcttgcatgagccgttctacgggcacttcttcctcacccgttctgccatgcatacgtgtgagtccaaatccgcgcattggttgtaccagtgccaagtcagctacgactctttcggcgaggatggcttgctgtacttgggtaagggtggcttgaaagtcatcaaaatccacaaagcggtggtaagcccctgtattaatggtgtaagcacagttggccatgactgaccagttaactgtctggtgaccagggcgcacgagctcggtgtatttaaggcgcgaataggcgcgggtgtcaaagatgtaatcgttgcaggtgcgcaccagatactggtaccctataagaaaatgcggcggtggttggcggtagagaggccatcgttctgtagctggagcgccaggggcgaggtcttccaacataaggcggtgatagccgtagatgtacctggacatccaggtgattcctgcggcggtagtagaagcccgaggaaactcgcgtacgcggttccaaatgttgcgtagcggcatgaagtagttcattgtaggcacggtttgaccagtgaggcgcgcgcagtcattgatgctctatagacacggagaaaatgaaagcgttcagcgactcgactccgtagcctggaggaacgtgaacgggttgggtcgcggtgtaccccggttcgagacttgtactcgagccggccggagccgcggctaacgtggtattggcactcccgtctcgacccagcctacaaaaatccaggatacggaatcgagtcgttttgctggtttccgaatggcagggaagtgagtcctatttttttttttttttgccgctcagaatgcatcccgtgctgcgacagatgcgcccccaacaacagcccccctcgcagcagcagcagcagcaaccacaaaaggctgtccctgcaactactgcaactgccgccgtgagcggtgcgggacagcccgcctatgatctggacttggaagagggcgaaggactggcacgtctaggtgcgccttcgcccgagcggcatccgcgagttcaactgaaaaaagattctcgcgaggcgtatgtgccccaacagaacctatttagagacagaagcggcgaggagccggaggagatgcgagcttcccgctttaacgcgggtcgtgagctgcgtcacggtttggaccgaagacgagtgttgcgagacgaggatttcgaagttgatgaagtgacagggatcagtcctgccagggcacacgtggctgcagccaaccttgtatcggcttacgagcagacagtaaaggaagagcgtaacttccaaaagtcttttaataatcatgtgcgaaccctgattgcccgcgaagaagttacccttggtttgatgcatttgtgggatttgatggaagctatcattcagaaccctactagcaaacctctgaccgcccagctgtttctggtggtgcaacacagcagagacaatgaggctttcagagaggcgctgctgaacatcaccgaacccgaggggagatggttgtatgatcttatcaacattctacagagtatcatagtgcaggagcggagcctgggcctggccgagaaggtagctgccatcaattactcggttttgagcttgggaaaatattacgctcgcaaaatctacaagactccatacgttcccatagacaaggaggtgaagatagatgggttctacatgcgcatgacgctcaaggtcttgaccctgagcgatgatcttggggtgtatcgcaatgacagaatgcatcgcgcggttagcgccagcaggaggcgcgagttaagcgacagggaactgatgcacagtttgcaaagagctctgactggagctggaaccgagggtgagaattacttcgacatgggagctgacttgcagtggcagcctaatcgcagggctctgagcgccgcgacggcaggatgtgagcttccttacatagaagaggcggatgaaggcgaggaggaagagggcgagtacttggaagactgatggcacaacccgtgttttttgctagatggaacagcaagcaccggatcccgcaatgcgggcggcgctgcagagccagccgtccggcattaactcctcggacgattggacccaggccatgcaacgtatcatggcgttgacgactcgcaaccccgaagcctttagacagcaaccccaggccaaccgtctatcggccatcatggaagctgtagtgccttcccgatctaatcccactcatgagaaggtcctggccatcgtgaacgcgttggtggagaacaaagctattcgtccagatgaggccggactggtatacaacgctctcttagaacgcgtggctcgctacaacagtagcaatgtgcaaaccaatttggaccgtatgataacagatgtacgcgaagccgtgtctcagcgcgaaaggttccagcgtgatgccaacctgggttcgctggtggcgttaaatgctttcttgagtactcagcctgctaatgtgccgcgtggtcaacaggattatactaactttttaagtgctttgagactgatggtatcagaagtacctcagagcgaagtgtatcagtccggtcctgattacttctttcagactagcagacagggcttgcagacggtaaatctgagccaagcttttaaaaaccttaaaggtttgtggggagtgcatgccccggtaggagaaagagcaaccgtgtctagcttgttaactccgaactcccgcctgttattactgttggtagctcctttcaccgacagcggtagcatcgaccgtaattcctatttgggttacctactaaacctgtatcgcgaagccatagggcaaagtcaggtggacgagcagacctatcaagaaattacccaagtcagtcgcgctttgggacaggaagacactggcagtttggaagccactctgaacttcttgcttaccaatcggtctcaaaagatccctcctcaatatgctcttactgcggaggaggagaggatccttagatatgtgcagcagagcgtgggattgtttctgatgcaagagggggcaactccgactgcagcactggacatgacagcgcgaaatatggagcccagcatgtatgccagtaaccgacctttcattaacaaactgctggactacttgcacagagctgccgctatgaactctgattatttcaccaatgccatcttaaacccgcactggctgcccccacctggtttctacacgggcgaatatgacatgcccgaccctaatgacggatttctgtgggacgacgtggacagcgatgttttttcacctctttctgatcatcgcacgtggaaaaaggaaggcggtgatagaatgcattcttctgcatcgctgtccggggtcatgggtgctaccgcggctgagcccgagtctgcaagtccttttcctagtctacccttttctctacacagtgtacgtagcagcgaagtgggtagaataagtcgcccgagtttaatgggcgaagaggagtacctaaacgattccttgctcagaccggcaagagaaaaaaatttcccaaacaatggaatagaaagtttggtggataaaatgagtagatggaagacttatgctcaggatcacagagacgagcctgggatcatggggactacaagtagagcgagccgtagacgccagcgccatgacagacagaggggtcttgtgtgggacgatgaggattcggccgatgatagcagcgtgttggacttgggtgggagaggaaggggcaacccgtttgctcatttgcgccctcgcttgggtggtatgttgtgaaaaaaaataaaaaagaaaaactcaccaaggccatggcgacgagcgtacgttcgttcttctttattatctgtgtctagtataatgaggcgagtcgtgctaggcggagcggtggtgtatccggagggtcctcctccttcgtacgagagcgtgatgcagcagcagcaggcgacggcggtgatgcaatccccactggaggctccctttgtgcctccgcgatacctggcacctacggagggcagaaacagcattcgttactcggaactggcacctcagtacgataccaccaggttgtatctggtggacaacaagtcggcggacattgcttctctgaactatcagaatgaccacagcaacttcttgaccacggtggtgcagaacaatgactttacccctacggaagccagcacccagaccattaactttgatgaacgatcgcggtggggcggtcagctaaagaccatcatgcatactaacatgccaaacgtgaacgagtatatgtttagtaacaagttcaaagcgcgtgtgatggtgtccagaaaacctcccgacggtgctgcagttggggatacttatgatcacaagcaggatattttggaatatgagtggttcgagtttactttgccagaaggcaacttttcagttactatgactattgatttgatgaacaatgccatcatagataattacttgaaagtgggtagacagaatggagtgcttgaaagtgacattggtgttaagttcgacaccaggaacttcaagctgggatgggatcccgaaaccaagttgatcatgcctggagtgtatacgtatgaagccttccatcctgacattgtcttactgcctggctgcggagtggattttaccgagagtcgtttgagcaaccttcttggtatcagaaaaaaacagccatttcaagagggttttaagattttgtatgaagatttagaaggtggtaatattccggccctcttggatgtagatgcctatgagaacagtaagaaagaacaaaaagccaaaatagaagctgctacagctgctgcagaagctaaggcaaacatagttgccagcgactctacaagggttgctaacgctggagaggtcagaggagacaattttgcgccaacacctgttccgactgcagaatcattattggccgatgtgtctgaaggaacggacgtgaaactcactattcaacctgtagaaaaagatagtaagaatagaagctataatgtgttggaagacaaaatcaacacagcctatcgcagttggtatctttcgtacaattatggcgatcccgaaaaaggagtgcgttcctggacattgctcaccacctcagatgtcacctgcggagcagagcaggtttactggtcgcttccagacatgatgaaggatcctgtcactttccgctccactagacaagtcagtaactaccctgtggtgggtgcagagcttatgcccgtcttctcaaagagcttctacaacgaacaagctgtgtactcccagcagctccgccagtccacctcgcttacgcacgtcttcaaccgctttcctgagaaccagattttaatccgtccgccggcgcccaccattaccaccgtcagtgaaaacgttcctgctctcacagatcacgggaccctgccgttgcgcagcagtatccggggagtccaacgtgtgaccgttactgacgccagacgccgcacctgtccctacgtgtacaaggcactgggcatagtcgcaccgcgcgtcctttcaagccgcactttctaaaaaaaaaatgtccattcttatctcgcccagtaataacaccggttggggtctgcgcgctccaagcaagatgtacggaggcgcacgcaaacgttctacccaacatcccgtgcgtgttcgcggacattttcgcgctccatggggtgccctcaagggccgcactcgcgttcgaaccaccgtcgatgatgtaatcgatcaggtggttgccgacgcccgtaattatactcctactgcgcctacatctactgtggatgcagttattgacagtgtagtggctgacgctcgcaactatgctcgacgtaagagccggcgaaggcgcattgccagacgccaccgagctaccactgccatgcgagccgcaagagctctgctacgaagagctagacgcgtggggcgaagagccatgcttagggcggccagacgtgcagcttcgggcgccagcgccggcaggtcccgcaggcaagcagccgctgtcgcagcggcgactattgccgacatggcccaatcgcgaagaggcaatgtatactgggtgcgtgacgctgccaccggtcaacgtgtacccgtgcgcacccgtccccctcgcacttagaagatactgagcagtctccgatgttgtgtcccagcggcgaggatgtccaagcgcaaatacaaggaagaaatgctgcaggttatcgcacctgaagtctacggccaaccgttgaaggatgaaaaaaaaccccgcaaaatcaagcgggttaaaaaggacaaaaaagaagaggaagatggcgatgatgggctggcggagtttgtgcgcgagtttgccccacggcgacgcgtgcaatggcgtgggcgcaaagttcgacatgtgttgagacctggaacttcggtggtctttacacccggcgagcgttcaagcgctacttttaagcgttcctatgatgaggtgtacggggatgatgatattcttgagcaggcggctgaccgattaggcgagtttgcttatggcaagcgtagtagaataacttccaaggatgagacagtgtcaatacccttggatcatggaaatcccacccctagtcttaaaccggtcactttgcagcaagtgttacccgtaactccgcgaacaggtgttaaacgcgaaggtgaagatttgtatcccactatgcaactgatggtacccaaacgccagaagttggaggacgttttggagaaagtaaaagtggatccagatattcaacctgaggttaaagtgagacccattaagcaggtagcgcctggtctgggggtacaaactgtagacattaagattcccactgaaagtatggaagtgcaaactgaacccgcaaagcctactgccacctccactgaagtgcaaacggatccatggatgcccatgcctattacaactgacgccgccggtcccactcgaagatcccgacgaaagtacggtccagcaagtctgttgatgcccaattatgttgtacacccatctattattcctactcctggttaccgaggcactcgctactatcgcagccgaaacagtacctcccgccgtcgccgcaagacacctgcaaatcgcagtcgtcgccgtagacgcacaagcaaaccgactcccggcgccctggtgcggcaagtgtaccgcaatggtagtgcggaacctttgacactgccgcgtgcgcgttaccatccgagtatcatcacttaatcaatgttgccgctgcctccttgcagatatggccctcacttgtcgccttcgcgttcccatcactggttaccgaggaagaaactcgcgccgtagaagagggatgttgggacgcggaatgcgacgctacaggcgacggcgtgctatccgcaagcaattgcggggtggttttttaccagccttaattccaattatcgctgctgcaattggcgcgataccaggcatagcttccgtggcggttcaggcctcgcaacgacattgacattggaaaaaaaacgtataaataaaaaaaaatacaatggactctgacactcctggtcctgtgactatgttttcttagagatggaagacatcaatttttcatccttggctccgcgacacggcacgaagccgtacatgggcacctggagcgacatcggcacgagccaactgaacgggggcgccttcaattggagcagtatctggagcgggcttaaaaattttggctcaaccataaaaacatacgggaacaaagcttggaacagcagtacaggacaggcgcttagaaataaacttaaagaccagaacttccaacaaaaagtagtcgatgggatagcttccggcatcaatggagtggtagatttggctaaccaggctgtgcagaaaaagataaacagtcgtttggacccgccgccagcaaccccaggtgaaatgcaagtggaggaagaaattcctccgccagaaaaacgaggcgacaagcgtccgcgtcccgatttggaagagacgctggtgacgcgcgtagatgaaccgccttcttatgaggaagcaacgaagcttggaatgcccaccactagaccgatagccccaatggccaccggggtgatgaaaccttctcagttgcatcgacccgtcaccttggatttgccccctccccctgctgctactgctgtacccgcttctaagcctgtcgctgccccgaaaccagtcgccgtagccaggtcacgtcccgggggcgctcctcgtccaaatgcgcactggcaaaatactctgaacagcatcgtgggtctaggcgtgcaaagtgtaaaacgccgtcgctgcttttaattaaatatggagtagcgcttaacttgcctatctgtgtatatgtgtcattacacgccgtcacagcagcagaggaaaaaaggaagaggtcgtgcgtcgacgctgagttactttcaagatggccaccccatcgatgctgccccaatgggcatacatgcacatcgccggacaggatgcttcggagtacctgagtccgggtctggtgcagttcgcccgcgccacagacacctacttcaatctgggaaataagtttagaaatcccaccgtagcgccgacccacgatgtgaccaccgaccgtagccagcggctcatgttgcgcttcgtgcccgttgaccgggaggacaatacatactcttacaaagtgcggtacaccctggccgtgggcgacaacagagtgctggatatggccagcacgttctttgacattaggggcgtgttggacagaggtcccagtttcaaaccctattctggtacggcttacaactctctggctcctaaaggcgctccaaatgcatctcaatggattgcaaaaggcgtaccaactgcagcagccgcaggcaatggtgaagaagaacatgaaacagaggagaaaactgctacttacacttttgccaatgctcctgtaaaagccgaggctcaaattacaaaagagggcttaccaataggtttggagatttcagctgaaaacgaatctaaacccatctatgcagataaactttatcagccagaacctcaagtgggagatgaaacttggactgacctagacggaaaaaccgaagagtatggaggcagggctctaaagcctactactaacatgaaaccctgttacgggtcctatgcgaagcctactaatttaaaaggtggtcaggcaaaaccgaaaaactcggaaccgtcgagtgaaaaaattgaatatgatattgacatggaattttttgataactcatcgcaaagaacaaacttcagtcctaaaattgtcatgtatgcagaaaatgtaggtttggaaacgccagacactcatgtagtgtacaaacctggaacagaagacacaagttccgaagctaatttgggacaacagtctatgcccaacagacccaactacattggcttcagagataactttattggactcatgtactataacagtactggtaacatgggggtgctggctggtcaagcgtctcagttaaatgcagtggttgacttgcaggacagaaacacagaactttcttaccaactcttgcttgactctctgggcgacagaaccagatactttagcatgtggaatcaggctgtggacagttatgatcctgatgtacgtgttattgaaaatcatggtgtggaagatgaacttcccaactattgttttccactggacggcataggtgttccaacaaccagttacaaatcaatagttccaaatggagaagataataataattggaaagaacctgaagtaaatggaacaagtgagatcggacagggtaatttgtttgccatggaaattaaccttcaagccaatctatggcgaagtttcctttattccaatgtggctctgtatctcccagactcgtacaaatacaccccgtccaatgtcactcttccagaaaacaaaaacacctacgactacatgaacgggcgggtggtgccgccatctctagtagacacctatgtgaacattggtgccaggtggtctctggatgccatggacaatgtcaacccattcaaccaccaccgtaacgctggcttgcgttaccgatctatgcttctgggtaacggacgttatgtgcctttccacatacaagtgcctcaaaaattcttcgctgttaaaaacctgctgcttctcccaggctcctacacttatgagtggaactttaggaaggatgtgaacatggttctacagagttccctcggtaacgacctgcgggtagatggcgccagcatcagtttcacgagcatcaacctctatgctacttttttccccatggctcacaacaccgcttccacccttgaagccatgctgcggaatgacaccaatgatcagtcattcaacgactacctatctgcagctaacatgctctaccccattcctgccaatgcaaccaatattcccatttccattccttctcgcaactgggcggctttcagaggctggtcatttaccagactgaaaaccaaagaaactccctctttggggtctggatttgacccctactttgtctattctggttctattccctacctggatggtaccttctacctgaaccacacttttaagaaggtttccatcatgtttgactcttcagtgagctggcctggaaatgacaggttactatctcctaacgaatttgaaataaagcgcactgtggatggcgaaggctacaacgtagcccaatgcaacatgaccaaagactggttcttggtacagatgctcgccaactacaacatcggctatcagggcttctacattccagaaggatacaaagatcgcatgtattcatttttcagaaacttccagcccatgagcaggcaggtggttgatgaggtcaattacaaagacttcaaggccgtcgccataccctaccaacacaacaactctggctttgtgggttacatggctccgaccatgcgccaaggtcaaccctatcccgctaactatccctatccactcattggaacaactgccgtaaatagtgttacgcagaaaaagttcttgtgtgacagaaccatgtggcgcataccgttctcgagcaacttcatgtctatgggggcccttacagacttgggacagaatatgctctatgccaactcagctcatgctctggacatgacctttgaggtggatcccatggatgagcccaccctgctttatcttctcttcgaagttttcgacgtggtcagagtgcatcagccacaccgcggcatcatcgaggcagtctacctgcgtacaccgttctcggccggtaacgctaccacgtaagaagcttcttgcttcttgcaaatagcagctgcaaccatggcctgcggatcccaaaacggctccagcgagcaagagctcagagccattgtccaagacctgggttgcggaccctattttttgggaacctacgataagcgcttcccggggttcatggcccccgataagctcgcctgtgccattgtaaatacggccggacgtgagacggggggagagcactggttggctttcggttggaacccacgttctaacacctgctacctttttgatccttttggattctcggatgatcgtctcaaacagatttaccagtttgaatatgagggtctcctgcgccgcagcgctcttgctaccaaggaccgctgtattacgctggaaaaatctacccagaccgtgcagggcccccgttctgccgcctgcggacttttctgctgcatgttccttcacgcctttgtgcactggcctgaccgtcccatggacggaaaccccaccatgaaattgctaactggagtgccaaacaacatgcttcattctcctaaagtccagcccaccctgtgtgacaatcaaaaagcactctaccattttcttaatacccattcgccttattttcgctctcatcgtacacacatcgaaagggccactgcgttcgaccgtatggatgttcaataatgactcatgtaaacaacgtgttcaataaacatcactttatttttttacatgtatcaaggctctggattacttatttatttacaagtcgaatgggttctgacgagaatcagaatgacccgcaggcagtgatacgttgcggaactgatacttgggttgccacttgaattcgggaatcaccaacttgggaaccggtatatcgggcaggatgtcactccacagctttctggtcagctgcaaagctccaagcaggtcaggagccgaaatcttgaaatcacaattaggaccagtgctctgagcgcgagagttgcggtacaccggattgcagcactgaaacaccatcagcgacggatgtctcacgcttgccagcacggtgggatctgcaatcatgcccacatccagatcttcagcattggcaatgctgaacggggtcatcttgcaggtctgcctacccatggcgggcacccaattaggcttgtggttgcaatcgcagtgcagggggatcagtatcatcttggcctgatcctgtctgattcctggatacacggctctcatgaaagcatcatattgcttgaaagcctgctgggctttactaccctcgggataaaacatcccgcaggacctgctcgaaaactggttagcctgcacagccggcatcattcacacagcagcgggcgtcattgttggctatttgcaccacacttctgccccagcggttttgggtgattttggttcgctcgggattctcctttaaggctcgttgtccgttctcgctggccacatccatctcgataatctgctccttctgaatcataatattgccatgcaggcacttcagcttgccctcataatcattgcagccatgaggccacaacgcacagcctgtacattcccaattatggtgggcgatctgagaaaaagaatgtatcattccctgcagaaatcttcccatcatcgtgctcagtgtcttgtgactagtgaaagttaactggatgcctcggtgctcttcgtttacgtactggtgacagatgcgcttgtattgttcgtgttgctcaggcattagtttaaaacaggttctaagttcgttatccagcctgtacttctccatcagcagacacatcacttccatgcctttctcccaagcagacaccaggggcaagctaatcggattcttaacagtgcaggcagcagctcctttagccagagggtcatctttagcgatcttctcaatgcttcttttgccatccttctcaacgatgcgcacgggcgggtagctgaaacccactgctacaagttgcgcctcttctctttcttcttcgctgtcttgactgatgtcttgcatggggatatgtttggtcttccttggcttctttttggggggtatcggaggaggaggactgtcgctccgttccggagacagggaggattgtgacgtttcgctcaccattaccaactgactgtcggtagaagaacctgaccccacacggcgacaggtgtttttcttcgggggcagaggtggaggcgattgcgaagggctgcggtccgacctggaaggcggatgactggcagaaccccttccgcgttcgggggtgtgctccctgtggcggtcgcttaactgatttccttcgcggctggccat

SEQ ID NO: 250 - DNA, 3425 bp, Human adenovirus
  misc_feature 1..3425: note = Human adenovirus 35, Ad35 E3
  source 1..3425: mol_type = genomic DNA
atgtctggtgacgcggctgagctatctcggctgcgacatctagaccactgccgccgctttcgctgctttgcccgggaacttattgagttcatctacttcgaactccccaaggatcaccctcaaggtccggcccacggagtgcggattactatcgaaggcaaaatagactctcgcctgcaacgaattttctcccagcggcccgtgctgatcgagcgagaccagggaaacaccacggtttccatctactgcatttgtaatcaccccggattgcatgaaagcctttgctgtcttatgtgtactgagtttaataaaaactgaattaagactctcctacggactgccgcttcttcaacccggattttacaaccagaagaacaaaacttttcctgtcgtccaggactctgttaacttcacctttcctactcacaaactagaagctcaacgactacaccgcttttccagaagcattttccctactaatactactttcaaaaccggaggtgagctccacggtctccctacagaaaacccttgggtggaagcgggccttgtagtactaggaattcttgcgggtgggcttgtgattattctttgctacctatacacaccttgcttcactttcctagtggtgttgtggtattggtttaaaaaatggggcccatactagtcttgcttgttttactttcgcttttggaaccgggttctgccaattacgatccatgtctagactttgacccagaaaactgcacacttacttttgcacccgacacaagccgcatctgtggagttcttattaagtgcggatgggaatgcaggtccgttgaaattacacacaataacaaaacctggaacaataccttatccaccacatgggagccaggagttcccgagtggtacactgtctctgtccgaggtcctgacggttccatccgcattagtaacaacactttcattttttctgaaatgtgcgatctggccatgttcatgagcaaacagtattctctatggcctcctagcaaggacaacatcgtaacgttctccattgcttattgcttgtgcgcttgccttcttactgctttactgtgcgtatgcatacacctgcttgtaaccactcgcatcaaaaacgccaataacaaagaaaaaatgccttaacctctttctgtttacagacatggcttctcttacatctctcatatttgtcagcattgtcactgccgctcacggacaaacagtcgtctctatcccactaggacataattacactctcataggacccccaatcacttcagaggtcatctggaccaaactgggaagcgttgattactttgatataatctgtaacaaaacaaaaccaataatagtaacttgcaacatacaaaatcttacattgattaatgttagcaaagtttacagcggttactattatggttatgacagatacagtagtcaatatagaaattacttggttcgtgttacccagttgaaaaccacgaaaatgccaaatatggcaaagattcgatccgatgacaattctctagaaacttttacatctcccaccacacccgacgaaaaaaacatcccagattcaatgattgcaattgttgcagcggtggcagtggtgatggcactaataataatatgcatgcttttatatgcttgtcgctacaaaaagtttcatcctaaaaaacaagatctcctactaaggcttaacatttaatttctttttatacagccatggtttccactaccacattccttatgcttactagtctcgcaactctgacttctgctcgctcacacctcactgtaactataggctcaaactgcacactaaaaggacctcaaggtggtcatgtcttttggtggagaatatatgacaatggatggtttacaaaaccatgtgaccaacctggtagatttttctgcaacggcagagacctaaccattatcaacgtgacagcaaatgacaaaggcttctattatggaaccgactataaaagtagtttagattataacattattgtactgccatctaccactccaccaccccgcacaactactttctctagcagcagtgtcgctaacaatacaatttccaatccaacctttgccgcgcttttaaaacgcactgtgaataattctacaacttcacatacaacaatttccacttcaacaatcagcatcatcgctgcagtgacaattggaatatctattcttgtttttaccataacctactacgcctgctgctatagaaaagacaaacataaaggtgatccattacttagatttgatatttaatttgttctttttttttatttacagtatggtgaacaccaatcatggtacctagaaatttcttcttcaccatactcatctgtgcttttaatgtttgcgctactttcacagcagtagccacagcaaccccagactgtataggagcatttgcttcctatgcactttttgcttttgttacttgcatctgcgtatgtagcatagtctgcctggttattaattttttccaacttctagactggatccttgtgcgaattgcctacctgcgccaccatcccgaataccgcaaccaaaatatcgcggcacttcttagactcatctaaaaccatgcaggctatactaccaatatttttgcttctattgcttccctacgctgtctcaaccccagctgcctatagtactccaccagaacaccttagaaaatgcaaattccaacaaccgtggtcatttcttgcttgctatcgagaaaaatcagaaatccccccaaatttaataatgattgctggaataattaatataatctgttgcaccataatttcatttttgatataccccctatttgattttggctggaatgctcccaatgcacatgatcatccacaagacccagaggaacacattcccccacaaaacatgcaacatccaatagcgctaatagattacgaaagtgaaccacaacccccactactccctgctattagttacttcaacctaaccggcggagatgactgaaacactcaccacctccaattccgccgaggatctgctcgatatggacggccgcgtctcagaacaacgacttgcccaactacgcatccgccagcagcaggaacgcgtggccaaagagctcagagatgtcatccaaattcaccaatgcaaaaaaggcatattctgtttggtaaaacaagccaagatatcctacgagatcaccgctactgaccatcgcctctcttacgaacttggcccccaacgacaaaaatttacctgcatggtgggaatcaaccccatagttatcacccaacaaagtggagatactaagggttgcattcactgttcctgcgattccatcgagtgcacctacaccctgctgaagaccctatgcggcctaagagacctgctaccaatgaattaaa

SEQ ID NO: 251 - DNA, 972 bp, Human adenovirus
  misc_feature 1..972: note = Human adenovirus 35, Ad35 fiber
  source 1..972: mol_type = genomic DNA
atgaccaagagagtccggctcagtgactccttcaaccctgtctacccctatgaagatgaaagcacctcccaacaccccttttataacccagggtttatttccccaaatggcttcacacaaagcccagacggagttcttactttaaaatgtttaaccccactaacaaccacaggcggatctctacagctaaaagtgggagggggacttacagtggatgacactgatggtaccttacaagaaaacatacgtgctacagcacccattactaaaaataatcactctgtagaactatccattggaaatggattagaaactcaaaacaataaactatgtgccaaattgggaaatgggttaaaatttaacaacggtgacatttgtataaaggatagtattaacaccttatggactggaataaaccctccacctaactgtcaaattgtggaaaacactaatacaaatgatggcaaacttactttagtattagtaaaaaatggagggcttgttaatggctacgtgtctctagttggtgtatcagacactgtgaaccaaatgttcacacaaaagacagcaaacatccaattaagattatattttgactcttctggaaatctattaactgaggaatcagacttaaaaattccacttaaaaataaatcttctacagcgaccagtgaaactgtagccagcagcaaagcctttatgccaagtactacagcttatcccttcaacaccactactagggatagtgaaaactacattcatggaatatgttactacatgactagttatgatagaagtctatttcccttgaacatttctataatgctaaacagccgtatgatttcttccaatgttgcctatgccatacaatttgaatggaatctaaatgcaagtgaatctccagaaagcaacatagctacgctgaccacatccccctttttcttttcttacattacagaagacgacaactaa

SEQ ID NO: 252 - DNA, 126 bp, Human adenovirus
  misc_feature 1..126: note = Human adenovirus 35, Ad35 fiber tail
  source 1..126: mol_type = genomic DNA
atgaccaagagagtccggctcagtgactccttcaaccctgtctacccctatgaagatgaaagcacctcccaacaccccttttataacccagggtttatttccccaaatggcttcacacaaagccca

SEQ ID NO: 253 - DNA, 273 bp, Human adenovirus; identical to SEQ ID NO: 217
  misc_feature 1..273: note = Human adenovirus 35, Ad35 fiber shaft
  source 1..273: mol_type = genomic DNA

SEQ ID NO: 254 - DNA, 573 bp, Human adenovirus
  misc_feature 1..573: note = Human adenovirus 35, Ad35 fiber knob
  source 1..573: mol_type = genomic DNA
ttatggactggaataaaccctccacctaactgtcaaattgtggaaaacactaatacaaatgatggcaaacttactttagtattagtaaaaaatggagggcttgttaatggctacgtgtctctagttggtgtatcagacactgtgaaccaaatgttcacacaaaagacagcaaacatccaattaagattatattttgactcttctggaaatctattaactgaggaatcagacttaaaaattccacttaaaaataaatcttctacagcgaccagtgaaactgtagccagcagcaaagcctttatgccaagtactacagcttatcccttcaacaccactactagggatagtgaaaactacattcatggaatatgttactacatgactagttatgatagaagtctatttcccttgaacatttctataatgctaaacagccgtatgatttcttccaatgttgcctatgccatacaatttgaatggaatctaaatgcaagtgaatctccagaaagcaacatagctacgctgaccacatccccctttttcttttcttacattacagaagacgacaactaa

SEQ ID NO: 255 - DNA, 1686 bp, Human adenovirus
  misc_feature 1..1686: note = Human adenovirus 35, Ad35 penton
  source 1..1686: mol_type = genomic DNA
atgaggcgagtcgtgctaggcggagcggtggtgtatccggagggtcctcctccttcgtacgagagcgtgatgcagcagcagcaggcgacggcggtgatgcaatccccactggaggctccctttgtgcctccgcgatacctggcacctacggagggcagaaacagcattcgttactcggaactggcacctcagtacgataccaccaggttgtatctggtggacaacaagtcggcggacattgcttctctgaactatcagaatgaccacagcaacttcttgaccacggtggtgcagaacaatgactttacccctacggaagccagcacccagaccattaactttgatgaacgatcgcggtggggcggtcagctaaagaccatcatgcatactaacatgccaaacgtgaacgagtatatgtttagtaacaagttcaaagcgcgtgtgatggtgtccagaaaacctcccgacggtgctgcagttggggatacttatgatcacaagcaggatattttggaatatgagtggttcgagtttactttgccagaaggcaacttttcagttactatgactattgatttgatgaacaatgccatcatagataattacttgaaagtgggtagacagaatggagtgcttgaaagtgacattggtgttaagttcgacaccaggaacttcaagctgggatgggatcccgaaaccaagttgatcatgcctggagtgtatacgtatgaagccttccatcctgacattgtcttactgcctggctgcggagtggattttaccgagagtcgtttgagcaaccttcttggtatcagaaaaaaacagccatttcaagagggttttaagattttgtatgaagatttagaaggtggtaatattccggccctcttggatgtagatgcctatgagaacagtaagaaagaacaaaaagccaaaatagaagctgctacagctgctgcagaagctaaggcaaacatagttgccagcgactctacaagggttgctaacgctggagaggtcagaggagacaattttgcgccaacacctgttccgactgcagaatcattattggccgatgtgtctgaaggaacggacgtgaaactcactattcaacctgtagaaaaagatagtaagaatagaagctataatgtgttggaagacaaaatcaacacagcctatcgcagttggtatctttcgtacaattatggcgatcccgaaaaaggagtgcgttcctggacattgctcaccacctcagatgtcacctgcggagcagagcaggtttactggtcgcttccagacatgatgaaggatcctgtcactttccgctccactagacaagtcagtaactaccctgtggtgggtgcagagcttatgcccgtcttctcaaagagcttctacaacgaacaagctgtgtactcccagcagctccgccagtccacctcgcttacgcacgtcttcaaccgctttcctgagaaccagattttaatccgtccgccggcgcccaccattaccaccgtcagtgaaaacgttcctgctctcacagatcacgggaccctgccgttgcgcagcagtatccggggagtccaacgtgtgaccgttactgacgccagacgccgcacctgtccctacgtgtacaaggcactgggcatagtcgcaccgcgcgtcctttcaagccgcactttctaa

SEQ ID NO: 256 - DNA, 2859 bp, Human adenovirus
  misc_feature 1..2859: note = Human adenovirus 35, Ad35 hexon
  source 1..2859: mol_type = genomic DNA
atggccaccccatcgatgctgccccaatgggcatacatgcacatcgccggacaggatgcttcggagtacctgagtccgggtctggtgcagttcgcccgcgccacagacacctacttcaatctgggaaataagtttagaaatcccaccgtagcgccgacccacgatgtgaccaccgaccgtagccagcggctcatgttgcgcttcgtgcccgttgaccgggaggacaatacatactcttacaaagtgcggtacaccctggccgtgggcgacaacagagtgctggatatggccagcacgttctttgacattaggggcgtgttggacagaggtcccagtttcaaaccctattctggtacggcttacaactctctggctcctaaaggcgctccaaatgcatctcaatggattgcaaaaggcgtaccaactgcagcagccgcaggcaatggtgaagaagaacatgaaacagaggagaaaactgctacttacacttttgccaatgctcctgtaaaagccgaggctcaaattacaaaagagggcttaccaataggtttggagatttcagctgaaaacgaatctaaacccatctatgcagataaactttatcagccagaacctcaagtgggagatgaaacttggactgacctagacggaaaaaccgaagagtatggaggcagggctctaaagcctactactaacatgaaaccctgttacgggtcctatgcgaagcctactaatttaaaaggtggtcaggcaaaaccgaaaaactcggaaccgtcgagtgaaaaaattgaatatgatattgacatggaattttttgataactcatcgcaaagaacaaacttcagtcctaaaattgtcatgtatgcagaaaatgtaggtttggaaacgccagacactcatgtagtgtacaaacctggaacagaagacacaagttccgaagctaatttgggacaacagtctatgcccaacagacccaactacattggcttcagagataactttattggactcatgtactataacagtactggtaacatgggggtgctggctggtcaagcgtctcagttaaatgcagtggttgacttgcaggacagaaacacagaactttcttaccaactcttgcttgactctctgggcgacagaaccagatactttagcatgtggaatcaggctgtggacagttatgatcctgatgtacgtgttattgaaaatcatggtgtggaagatgaacttcccaactattgttttccactggacggcataggtgttccaacaaccagttacaaatcaatagttccaaatggagaagataataataattggaaagaacctgaagtaaatggaacaagtgagatcggacagggtaatttgtttgccatggaaattaaccttcaagccaatctatggcgaagtttcctttattccaatgtggctctgtatctcccagactcgtacaaatacaccccgtccaatgtcactcttccagaaaacaaaaacacctacgactacatgaacgggcgggtggtgccgccatctctagtagacacctatgtgaacattggtgccaggtggtctctggatgccatggacaatgtcaacccattcaaccaccaccgtaacgctggcttgcgttaccgatctatgcttctgggtaacggacgttatgtgcctttccacatacaagtgcctcaaaaattcttcgctgttaaaaacctgctgcttctcccaggctcctacacttatgagtggaactttaggaaggatgtgaacatggttctacagagttccctcggtaacgacctgcgggtagatggcgccagcatcagtttcacgagcatcaacctctatgctacttttttccccatggctcacaacaccgcttccacccttgaagccatgctgcggaatgacaccaatgatcagtcattcaacgactacctatctgcagctaacatgctctaccccattcctgccaatgcaaccaatattcccatttccattccttctcgcaactgggcggctttcagaggctggtcatttaccagactgaaaaccaaagaaactccctctttggggtctggatttgacccctactttgtctattctggttctattccctacctggatggtaccttctacctgaaccacacttttaagaaggtttccatcatgtttgactcttcagtgagctggcctggaaatgacaggttactatctcctaacgaatttgaaataaagcgcactgtggatggcgaaggctacaacgtagcccaatgcaacatgaccaaagactggttcttggtacagatgctcgccaactacaacatcggctatcagggcttctacattccagaaggatacaaagatcgcatgtattcatttttcagaaacttccagcccatgagcaggcaggtggttgatgaggtcaattacaaagacttcaaggccgtcgccataccctaccaacacaacaactctggctttgtgggttacatggctccgaccatgcgccaaggtcaaccctatcccgctaactatccctatccactcattggaacaactgccgtaaatagtgttacgcagaaaaagttcttgtgtgacagaaccatgtggcgcataccgttctcgagcaacttcatgtctatgggggcccttacagacttgggacagaatatgctctatgccaactcagctcatgctctggacatgacctttgaggtggatcccatggatgagcccaccctgctttatcttctcttcgaagttttcgacgtggtcagagtgcatcagccacaccgcggcatcatcgaggcagtctacctgcgtacaccgttctcggccggtaacgctaccacgtaa

SEQ ID NO: 257 - protein, 323 aa, Human adenovirus; identical to SEQ ID NO: 85
  REGION 1..323: note = misc_feature - Human adenovirus 35, Ad35 fiber

SEQ ID NO: 258 - protein, 91 aa, Human adenovirus; identical to SEQ ID NO: 222
  REGION 1..91: note = misc_feature - Human adenovirus 35, Ad35 fiber shaft

SEQ ID NO: 259 - protein, 190 aa, Human adenovirus
  REGION 1..190: note = misc_feature - Human adenovirus 35, Ad35 fiber knob
LWTGINPPPNCQIVENTNTNDGKLTLVLVKNGGLVNGYVSLVGVSDTVNQMFTQKTANIQLRLYFDSSGNLLTEESDLKIPLKNKSSTATSETVASSKAFMPSTTAYPFNTTTRDSENYIHGICYYMTSYDRSLFPLNISIMLNSRMISSNVAYAIQFEWNLNASESPESNIATLTTSPFFFSYITEDDN

SEQ ID NO: 260 - protein, 561 aa, Human adenovirus; identical to SEQ ID NO: 86
  REGION 1..561: note = misc_feature - Human adenovirus 35, Ad35 penton

SEQ ID NO: 261 - protein, 952 aa, Human adenovirus; identical to SEQ ID NO: 87
  REGION 1..952: note = misc_feature - Human adenovirus 35, Ad35 hexon

SEQ ID NO: 262 - protein, 42 aa, Human adenovirus; identical to SEQ ID NO: 136
  REGION 1..42: note = misc_feature - Human adenovirus 35, Ad35 fiber tail

SEQ ID NO: 263 - DNA, 35343 bp, Human adenovirus
  misc_feature 1..35343: note = Human adenovirus 3, NCBI Accession No. NC_011203
  source 1..35343: mol_type = genomic DNA
ctatctatataatataccttatagatggaatggtgccaacatgtaaatgaggtaatttaaaaaagtgcgcgctgtgtggtgattggctgcggggttaacggctaaaaggggcggcgcgaccgtgggaaaatgacgtgacttatgtgggaggagttatgttgcaagttattacggtaaatgtgacgtaaaacgaggtgtggtttgaacacggaagtagacagttttcccacgcttactgacaggatatgaggtagttttgggcggatgcaagtgaaaattctccattttcgcgcgaaaactaaatgaggaagtgaatttctgagtcatttcgcggttatgccagggtggagtatttgccgagggccgagtagactttgaccgtttacgtggaggtttcgattaccgtgtttttcacctaaatttccgcgtacggtgtcaaagttctgtgtttttacgtaggtgtcagctgatcgctagggtatttaaacctgacgagttccgtcaagaggccactcttgagtgccagcgagaagagttttctcctccgcgccgcaagtcagttctgcgctttgaaaatgagacacctgcgcttcctgccacaggaggttatctccagtgagaccgggatcgaaatactggagtttgtggtaaataccctaatgggagacgacccggaaccgccagtgcagcctttcgatccacctacgctgcacgatctgtatgatttagagatagacgggccggaggatcccaatgaggaagctgtgaatgggttttttactgattctatgctgctagctgctgatgaaggattggacataaaccctcctcctgagacacttgttaccccaggggtggttgtggaaagcggcataggtgggaaaaaattgcctgatctgggagcagctgaaatggacttgcgttgttatgaagagggttttcctcccagtgatgatgaagatggggaaactgagcagtccatccataccgcagtaaatgagggagtaaaagctgccagcgatgtttttaagttggactgtccggagctgcctggacatggctgtaagtcttgtgaatttcacaggaataacactggaatgaaagaactattgtgctcgctttgctatatgagaatgcactgccactttatttacagtaagtgtatttaagtgaaatttaaaggaatagtgtagctatttaataactgttgaatggtagatttatgtttttttcttgcgattttttgtaggtcctgtgtctgatgatgagtcaccttctcctgattcaactacctcacctcctgaaattcaggcgcccgcacctgcaaacgtatgcaagcccattcctgtgaagcctaagcctgggaaacgccctgctgtggataagcttgaggacttgttggagggtggggatggacctttggaccttagtacccggaaactgccaaggcaatgagtgccctgcagctgtgtttatttaatgtgacgtcatgtaataaaattatgtcagctgctgagtgttttattacttcttgggtggggacttggatatataagtaggagcagatctgtgtggttagctcacagcaacctgctgccatccatggaggtttgggctatcttggaagacctcagacagactaagctactgctagaaaacgcctcggacggagtctctggcctttggagattctggttcggtggtgatctagctaggctagtgtttaggataaaacaggactacagggaagaatttgaaaagttattggacgatagtccgggactttttgaagctcttaacttgggtcatcaggctcattttaaggagaaggttttatcagttttagatttttctactcctggtagaactgctgctgctgtagcttttcttacttttatattggataaatggatccgccaaactcacttcagcaagggatacgttttggatttcatagcagcagctttgtggagaacatggaaggctcgcaggatgaggacaatcttagattactggccagtgcagcctctgggagtagcagggatactgagacacccaccgaccatgccagcggttctgcaggaggagcagcaggaggacaatccgagagccggcctggaccctccggtggaggagtagctgacctgtttcctgaactgcgacgggtgcttactaggtctacgaccagtggacagaacaggggaattaagagggagaggaatcctagtgggaataattcaagaaccgagttggctttaagtttaatgagccgcaggcgtcctgaaactgtttggtggcatgaggttcagagcgaaggcagggatgaagtttcaatattgcaggagaaatattcactagaacaacttaagacctgttggttggaacctgaggatgattgggaggtggccattaggaattatgctaagatatctctgaggcctgataaacaatatagaattactaagaagattaatattagaaatgcatgctacatatcagggaatggggcagaggttataatagatacacaagataaagcagtttttagatgttgtatgatgggtatgtggccaggggttgtcggcatggaagcagtaacacttatgaatattaggtttaaaggggatgggtataatggcattgtatttatggctaacactaagctgattctacatggttgtagcttttttgggtttaataatacgtgtgtagaagcttgggggcaagttagtgtgaggggttgtagtttttatgcatgctggattgcaacatcaggtagggtcaagagtcagttgtctgtgaagaaatgcatgtttgagagatgtaatcttggcatactgaatgaaggtgaagcaagggtccgccactgcgcagctacagaaactggctgcttcattctaataaagggaaatgccagtgtgaagcataatatgatctgtggacattcggatgagaggccttatcagatgctgacctgcgctggtggacattgcaatattcttgctaccgtgcatatcgtttcacatgcacgcaaaaaatggcctgtatttgaacataatgtgattaccaagtgcaccatgcacataggtggtcgcaggggaatgtttatgccttaccagtgtaacatgaatcatgtgaaggtaatgttggaaccagatgccttttccagagtgagcttaacaggaatctttgatatgaatattcaactatggaagatcctgagatatgatgacactaaaccaagggtgcgcgcatgcgaatgcggaggcaagcatgctagattccagccggtgtgcgtggatgtgactgaagacttgagacccgatcatttggtgcttgcctgcactggagcggagttcggttctagtggtgaagaaactgactaaagtgagtagtggggcaagatgtggatggggactttcaggttggtaaggtgggcagattgggtaaattttgttaatttctgtcttgcagctgccatgagtggaagcgcttcttttgaggggggagtatttagcccttatctgacgggcaggctcccaccatgggcaggagttcgtcagaatgtcatgggatccactgtggatgggagacccgtccagcccgccaattcctcaacgctgacctatgccactttgagttcgtcaccattggatgcagctgcagccgccgccgctactgctgccgccaacaccatccttggaatgggctattatggaagcatcgttgccaattccagttcctctaataacccttcaaccctggctgaggacaagctacttgttctcttggcgcagctcgaggccttaacccaacgcttaggcgaactgtctaagcaggtggcccagttgcgtgagcaaactgagtctgctgttgccacagcaaagtctaaataaagatctcaaatcaataaataaagaaatacttgatataaaacaaatgaatgtttatttgatttttcgcgcgcggtatgccctggaccatcggtctcgatcattgagaacgcggtggatcttttccagtaccctgtaaaggtgggattgaatgtttagatacatgggcattagtccgtctcgggggtggagatagctccattgaagagcctcttgctccggggtagtgttataaatcacccagtcatagcaaggtcggagtgcatggtgttgcacaatatcttttaggagcagactaattgcaacggggaggcccttagtgtaggtgtttacaaatctgttgagctgggacgggtgcatccggggtgaaattatatgcattttggactggatcttgaggttggcaatgttgccgcctagatcccgtctcgggttcatattgtgcaggaccaccaagacagtgtatccggtgcacttgggaaatttatcatgcagcttagagggaaaagcatgaaaaaatttggagacgcctttgtgaccccccagattctccatgcactcatccataatgatagcgatggggccgtgggcagcggcacgggcgaacacgttccgggggtctgaaacatcatagttatgctcctgagtcaggtcatcataagccattttaataaactttgggcggagggtgccagattgggggatgaaagttccctctggcccgggagcatagtttccctcacatatttgcatttcccaggctttcagttcagagggggggatcatgtccacctgcggggctataaaaaataccgtttctggagccggggtgattaactgggacgagagcaaattcctaagcagctgagacttgccgcacccagtgggaccgtaaatgaccccaattacgggttgcagatggtagtttagggaacgacagctgccgtcctcccggagcaggggggccacttcgttcatcatttcccttacatggatattttcccgcaccaagtccgttaggaggcgctctcccccaagggatagaagctcctggagcgaggagaagtttttcagcggcttcagcccgtcagccatgggcattttggaaagagtctgttgcaagagctcgagccggtcccagagctcggtgatgtgctctatggcatctcgatccagcagacctcctcgtttcgcgggttgggacggctcctggagtagggaatcagacgatgggcgtccagcgctgccagggtccgatccttccatggtcgcagcgtccgagtcagggttgtttccgtcacggtgaaggggtgcgcgcctggttgggcgcttgcgagggtgcgcttcagactcatcctgctggtcgagaaccgctgccgattggcgccctgcatgtcggccaggtagcagtttaccatgagttcgtagttgagcgcctcggccgcgtggcctttggcacggagcttacctttggaagttttatggcaggcggggcagtagatacatttgagggcatacaacttgggcgcgaggaaaatggattcgggggagtatgcatccgcaccgcaggaggcgcagacggtttcgcactccacgagccaggtcagatccggctcatcggggtcaaaaacaagttttccgccatgttttttgatgcgtttcttacctttggtttccatgagttcgtgtccccgctgggtgacaaagaggctgtccgtgtccccgtagaccgactttatgggcctgtcctcgagcggagtgcctcggtcctcttcgtagaggaacccagcccactctgatacaaaagcgcgtgtccaggccagcacaaaggaggccacgtgggaggggtagcggtcgttgtcaaccagggggtccaccttctctacggtatgtaaacacatgtccccctcctccacatccaagaatgtgattggcttgtaagtgtaggccacgtgaccaggggtccccgccgggggggtataaaagggggcgggcctctgttcgtcctcactgtcttccggatcgctgtccaggagcgccagctgttggggtaggtattccctctcgaaggcgggcatgacctctgcactcaggttgtcagtttctaggaacgaggaggatttgatattgacagtaccagcagagatgcctttcataagactctcgtccatctggtcagaaaacacaatcttcttgttgtccagcttggtggcaaatgatccatagagggcattggatagaagcttggcgatggagcgcatggtttggttcttttccttgtccgcgcgctccttggcggtgatgttaagctggacgtactcgcgcgccacacatttccattcaggaaagatggttgtcagttcatccggaactattctgattcgccatcccctattgtgcagggttatcagatccacactggtggccacctcgcctcggaggggctcattggtccagcagagtcgacctccttttcttgaacagaaaggggggagggggtctagcatgaactcatcaggggggtccgcatctatggtaaatattcccggtagcaaatctttgtcaaaatagctgatggtggcgggatcatccaaggtcatctgccattctcgaactgccagcgcgcgctcataggggttaagaggggtgccccagggcatggggtgggtgagcgcggaggcatacatgccacagatatcgtagacatagaggggctcttcgaggatgccgatgtaagtgggataacatcgcccccctctgatgcttgctcgcacatagtcatagagttcatgtgagggggcaagaagacccgggcccagattggtgcggttgggtttttccgccctgtaaacgatctggcgaaagatggcatgggaattggaagagatagtaggtctctggaatatgttaaaatgggcatgaggtaagcctacagagtcccttatgaagtgggcatatgactcttgcagcttggctaccagctcggcggtgatgagtacatccagggcacagtagtcgagagtttcctggatgatgtcataacgcggttggcttttcttttcccacagctcgcggttgagaaggtattcttcgtgatccttccagtactcttcgaggggaaacccgtctttttctgcacggtaagagcccaacatgtagaactgattgactgccttgtagggacagcatcccttctccactgggagagagtatgcttgggctgcattgcgcagcgaggtatgagtgagggcaaaagtgtccctgaccatgactttgaggaattgatacttgaagtcgatgtcatcacaggccccctgttcccagagttggaagtccacccgcttcttgtaggcggggttgggcaaagcgaaagtaacatcattgaagaggatcttgccggccctgggcatgaaatttcgggtgattttgaaaggctgaggaacctctgctcggttattgataacctgagcggccaagacgatctcatcaaagccattgatgttgtgccccactatgtacagttctaagaatcgaggggtgcccctgacatgaggcagcttcttgagttcttcaaaagtgagatctgtagggtcagtgagagcatagtgttcgagggcccattcgtgcacgtgagggttcgctttaaggaaggaggaccagaggtccactgccagtgctgtttgtaactggtcccggtactgacgaaaatgctgtccgactgccatcttttctggggtgacgcaatagaaggtttgggggtcctgccgccagcgatcccacttgagttttatggcgaggtcataggcgatgttgacgagccgctggtctccagagagtttcatgaccagcatgaaggggattagctgcttgccaaaggaccccatccaggtgtaggtttccacatcgtaggtgagaaagagcctttctgtgcgaggatgagagccaatcgggaagaactggatctcctgccaccagttggaggaatggctgttgatgtgatggaagtagaactccctgcgacgcgccgagcattcatgcttgtgcttgtacagacggccgcagtactcgcagcgattcacgggatgcaccttatgaatgagttgtacctgacttcctttgacgagaaatttcagtggaaaattgaggcctggcgcttgtacctcgcgctttactatgttgtctgcatcggcatgaccatcttctgtctcgatggtggtcatgctgacgagccctcgcgggaggcaagtccagacctcggcgcggcaggggcggagctcgaggacgagagcgcgcaggccggagctgtccagggtcctgagacgctgcggagtcaggttagtaggcagtgtcaggagattaacttgcatgatcttttggagggcgtgagggaggttcagatagtacttgatctcaacgggtccgttggtggagatgtcgatggcttgcagggttccgtgtcccttgggcgctaccaccgtgcccttgtttttcattttggacggcggtggctctgttgcttcttgcatgtttagaagcggtgtcgagggcgcgcaccgggcggcaggggcggctcgggacccggcggcatggctggcagtggtacgtcggcgccgcgcgcgggtaggttctggtactgcgccctgagaagactcgcatgcgcgacgacgcggcggttgacatcctggatctgacgcctctgggtgaaagctaccggccccgtgagcttgaacctgaaagagagttcaacagaatcaatctcggtatcgttgacggcggcttgcctaaggatttcttgcacgtcgccagagttgtcctggtaggcgatctcggccatgaactgctcgatctcttcctcttgaagatctccgcggcccgctctctcgacggtggccgcgaggtcgttggagatgcgcccaatgagttgagagaatgcattcatgcccgcctcgttccagacgcggctgtagaccacagcccccacgggatctctcgcgcgcatgaccacctgggcgaggttgagctccacgtggcgggtgaagaccgcatagttgcataggcgctggaaaaggtagttgagtgtggtggcgatgtgctcggtgacgaagaaatacatgatccatcgtctcagcggcatctcgctgacatcgcccagcgcttccaagcgctccatggcctcgtagaagtccacggcaaagttaaaaaactgggagttacgcgcggacacggtcaactcctcttccagaagacggataagttcggcgatggtggtgcgcacctcgcgctcgaaagcccctgggatttcttcctcaatctcttcttcttccactaacatctcttcctcttcaggtggggctgcaggaggagggggaacgcggcgacgccggcggcgcacgggcagacggtcgatgaatctttcaatgacctctccgcggcggcggcgcatggtctcggtgacggcacgaccgttctccctgggtctcagagtgaagacgcctccgcgcatctccctgaagtggtgactgggaggctctccgttgggcagggacaccgcgctgattatgcattttatcaattgccccgtaggtactccgcgcaaggacctgatcgtctcaagatccacgggatctgaaaacctttcgacgaaagcgtctaaccagtcgcaatcgcaaggtaggctgagcactgtttcttgcgggcgggggcggctagacgctcggtcggggttctctctttcttctccttcctcctcttgggagggtgagacgatgctgctggtgatgaaattaaaataggcagttttgagacggcggatggtggcgaggagcaccaggtctttgggtccggcttgttggatacgcaggcgatgagccattccccaagcattatcctgacatctggccagatctttatagtagtcttgcatgagtcgttccacgggcacttcttcttcgcccgctctgccatgcatgcgagtgatcccgaacccgcgcatgggctggacaagtgccaggtccgctacaaccctttcggcgaggatggcttgctgcacctgggtgagggtggcttggaagtcgtcaaagtccacgaagcggtggtaggccccggtgttgattgtgtaggagcagttggccatgactgaccagttgactgtctggtgcccagggcgcacgagctcggtgtacttgaggcgcgagtatgcgcgggtgtcaaagatgtaatcgttgcaggtgcgcaccaggtactggtagccaatgagaaagtgtggcggtggctggcggtacaggggccatcgctctgtagccggggctccgggggcgaggtcttccagcatgaggcggtggtagccgtagatgtacctggacatccaggtgataccggaggcggtggtggatgcacgtgggaactcgcgcacgcggttccagatgttgcgcagcggcatgaagtagttcatggtaggcacggtctggccagtgaggcgcgcgcagtcattgacgctctgtagacacggagaaaacgaaagcgatgagcggctcgactccgtggtctgggggaacgtgaacgggttgggtcgcggtgtaccccggttcgagtccaaagctaagcgatcacgctcggatcggccggagccgcggctaacgtggtattggctatcccgtctcgacccagccgacgaatatccagggtacggagtagagtcgtttttgctgctttttcctggacgtgtgccattgccacgtcaagctttagaacgctcagttctcgggccgtgagtggctcgcgcccgtagtctggagaatcagtcgccagggttgcgttgcggtatgccccggttggagcctaagcgcggctcgtatcggccggtttccgcgacaagcgagggtttggcagccccgttatttccaagaccccgccagccgacttctccagtttacgggagcgagcccttttttttttttttttgtttttgtcgcccagatgcatccagtgctgcgacagatgcgcccccagcaacaggccccttctcagcaacagccacaaaaggctcttcttgctcctgcaactactgcagctgcagccgtgagcggcgcgggacagcccgcctatgatctggacttggaagagggcgagggattggcgcgcctgggggctccatcgcccgagcggcacccgcgggtgcaactaaaaaaggactctcgcgaggcgtacgtgccccagcagaacctgttcagggacaggagcggcgaggagccagaggagatgcgagcatctcgatttaacgcgggtcgcgagctgcgccacggtctggatcgaagacgggtgctgcaagacgaggattttgaggtcgatgaagtcacagggatcagcccagctagggcacatgtggccgcggccaacctagtctcggcctacgagcagaccgtgaaggaggagcgcaacttccaaaaatcttttaacaaccatgtgcgcaccctgatcgcccgcgaggaagtgaccctgggtctgatgcatctgtgggacctgatggaggctatcgcccaaaaccccactagcaaaccactgacagctcagctgtttctggtggttcaacatagcagggacaacgaggcattcagggaggcgttgttgaacatcaccgagcctgatgggagatggctgtatgatctgatcaacatcctgcaaagtattatagtgcaggaacgtagcctgggtttggctgagaaagtggcagctatcaactactcggtcttgagcctgggcaaatactacgctcgcaagatctacaagaccccctacgtacccatagacaaggaggtgaagatagatgggttttacatgcgcatgactctgaaggtgctgactctgagcgacgatctgggggtgtatcgcaatgacaggatgcaccgcgcggtgagcgccagcaggaggcgcgagctgagcgacagagaacttatgcacagcttgcaaagagctctaacgggggccgggactgatggggagaactactttgacatgggagcggatttgcaatggcaacccagtcgcagggccatggaggctgcagggtgtgagcttccttacatagaagaggtggatgaagtcgaggacgaggagggcgagtacttggaagactgatggcgcgacccgtatttttgctagatggaacagcagcaggcaccggaccccgcaatgcgggcggcgctgcagagccagccgtccggcattaactcctcggacgattggacccaggccatgcaacgcataatggcgctgacgacccgcaaccccgaagcctttagacagcaaccccaggccaaccgcctttctgccatactggaggccgtagtgccctcccgctccaaccccacccacgagaaggtcctggctatcgtgaacgcgctggtggagaacaaggccatccgtcccgatgaggccgggctggtatacaatgctctcttggagcgcgtggcccgttacaacagcagcaacgtgcaaaccaacctggaccggatggtgaccgatgtgcgcgaggccgtgtctcagcgcgagcgattccagcgcgacgccaacttggggtcgttggtagcgctaaacgctttcctcagcacccagcccgccaacgtgccccgtggtcagcaagactatacaaactttttgagtgcattgagactcatggtagctgaggtgccccagagcgaggtgtaccagtccgggccagattacttcttccagaccagcagacagggcttgcagacagtgaacctgactcaggctttcaagaacctgaagggtctgtggggagtgcacgccccagtaggggatcgcgcgaccgtgtctagcttgctgactcccaactcccgcctgctgctgctgctggtatccccctttactgacagcggtagcattgaccgcaactcgtacttgggctacctgcttaacctgtatcgcgaggccataggacagagccaggtggacgagcagacctatcaagaaatcacccaagtgagccgcgccctgggtcaggaagacacgggcagtttggaagccaccctgaacttcttgctaaccaaccggtcacagaagatccctcctcagtatgcgcttaccgctgaggaggagcggatcctcagatacgtgcaacagagcgttggactgttcctgatgcaggagggggcgacacctaccgccgcgctggacatgacagctcgaaacatggagcccagcatgtatgctagtaacaggcctttcattaacaaactgctggactacctgcacagggcggccgccatgaactctgattatttcaccaatgctatcctgaacccacactggctgcccccacctggtttctacactggcgagtacgacatgcccgaccccaatgacgggttcctgtgggacgatgtggacagcagcatattttccccgcctcccggttatacagtttggaagaaggaagggggcgatagaagacactcttccgtgtcgctatccggaacggctggtgctgccgcgaccgtgcccgaagctgcaagtcctttccctagcttgcccttttcactaaacagcgttcgcagcagtgaactggggagaataacccgcccgcgcttgatgggcgaggatgagtacttgaatgactctttgctgaggccagagagggaaaagaacttccccaacaatggaatagagagtctggtggataagatgagtagatggaagacctatgcgcaggatcacagagacgagcccaggatcttgggggctacaagcagaccgatccgtagacgccagcgccacgacaggcagatgggtcttgtgtgggacgatgaggactctgccgatgatagcagcgtgttggacttgggtggaagaggagggggcaacccgttcgctcatctgcgtcccagattcgggcgcatgttgtaaaagtgaaagtaaaataaaaaggcaactcaccaaggccatggcgaccgagcgtgcgttcgttcttttttgttatctgtgtctagtacgatgaggagacgagccgtgctaggcggagcggtggtgtatccggagggtcctcctccttcttacgagagcgtgatgcagcaacaggcggcgatgatacagcccccactggaggctcccttcgtacccccacggtacctggcgcctacggaagggagaaacagcattcgttactcggagctgtcgcccctgtacgataccaccaagttgtatctggtggacaacaagtcggcggacatcgcctccctgaactatcagaacgaccacagcaacttcctgaccacggtggtgcagaacaatgactttacccccacggaggctagcacccagaccatcaactttgacgagcggtcgcgatggggcggtcagctgaagaccatcatgcacaccaacatgcccaacgtgaacgagtacatgttcagcaacaagttcaaggcgagggtgatggtgtccagaaaagctcctgaaggtgttacagtaaatgacacctatgatcataaagaggatatcttgaagtatgagtggtttgagttcattttaccagaaggcaacttttcagccaccatgacgatcgacctgatgaacaatgccatcattgacaactacctggaaattggcagacagaatggagtgctggaaagtgacattggtgttaagtttgacactagaaatttcaggctcgggtgggaccccgaaactaagttgattatgccaggtgtctacacttatgaggcattccatcctgacattgtattgctgcctggttgcggggtagactttactgaaagccgacttagcaacttgcttggcatcaggaagagacatccattccaggagggtttcaaaatcatgtatgaagatcttgaagggggtaatattcctgcccttttggatgtcactgcctatgaggaaagcaaaaaggataccactactgaaacaaccacactggctgttgcagaggaaactagtgaagatgatgatataactagaggagatacctatataactgaaaaacaaaaacgtgaagctgcagctgctgaagttaaaaaagagttaaagatccaacctctagaaaaagacagcaagagtagaagctacaatgtcttggaagacaaaatcaacacagcctaccgcagttggtacctgtcctacaattacggtaaccctgagaaaggaataaggtcttggacactgctcaccacttcagatgtcacctgtggggcagagcaggtctactggtcgctccctgacatgatgcaagacccagtcaccttccgctccacaagacaagtcaacaactacccagtggtgggtgcagagcttatgcccgtcttctcaaagagtttctacaatgagcaagccgtgtactctcagcagctccgacaggccacttcgctcacgcacgtcttcaaccgcttccctgagaaccagatcctcatccgcccgccggcgcccacaattaccaccgtcagtgaaaacgttcctgctctcacagatcacgggaccctgccgttacgcagcagtatccggggagtccagcgcgtgaccgttactgacgccagacgccgcacctgtccctacgtttacaaggccctgggcatagtcgcgccgcgcgttctttcaagccgcactttctaaaaaaaaaaaaaatgtccattctcatctcgcccagtaataataccggttggggactgtatgcgcccaccaagatgtatggaggcgcccgcaagcgctctacccagcatcctgtgcgcgttcgcggtcatttccgcgctccctggggcgcactcaagggtcgtacccgcactcggaccacggtcgatgatgtgatcgaccaggtggtcgccgatgctcgtaattatactcctactgcgcctacatctactgtggatgcagttattgacagtgtggtggcagacgcccgcgcctatgctcgccggaagagccgaaggaggcgcatcgccaggcgccacagggctactcccgccatgcgagccgcaaaagctattctgcggagggccaaacgtgtggggcgaagagccatgcttagagcggccagacgcgcggcttcaggtgccagcagcggcaggtcccgcaggcgcgcggccacggcggcagcagcggccattgccaacatggcccaaccgcgaagaggcaatgtgtactgggtgcgtgatgccactaccggccagcgcgtgcccgtgcgcacccgcccccctcgcacttagaagatactgagcagtctccgatgttgtgtcccagcggcaagtatgtccaagcgcaaatacaaggaagagatgctccaggtcatcgcgcctgaaatctacggtccgccggtgaaggatgaaaaaaagccccgcaaaatcaagcgggtcaaaaataacaaaaaggaagaagatgacgatgatgggctggtggagtttgtgcgcgagttcgccccaagacggcgcgtgcagtggcgcgggcgcaaagtgcgtcaagtgctcagacccgggaccactgtggtttttacacctggcgagcgttccagcactacttttaaacggtcctatgatgaggtgtacggggatgacgatattcttgagcaggcggcagaccgccttgacgagtttgcttatggcaagcgcactagatccagtcccaaagaggaggctgtgtccattcctttggatcatggaaatcccacccccagcctcaaaccagtcaccctgcagcaagtgctgcccgtgcctgcgcggagaggcgtaaagcgcgagggtgaggacctatatcccaccatgcagctaatggtgcccaagcgccagaggctagaagacgtactggagaaaatgaaagtggatgccgatatccagcctgaggtcaaagtaagacctatcaaggaagtggcgccaggtttgggagtacaaaccttcgacatcaagattcccaccgagtccatggaagtgcagaccgaacctgcaaaacccaccacctcaattgaggtgcaaacggaaccctggatgcccgcgcccgttgccgcccccagcaccactcgaagatcacgacgaaagtacggcccagcaagtctgctaatgcccaactatgctctgcacccatccatcattcccactccgggttacagaggcactcgctactatcgaaaccggagcaacacctctcgccgccgcaaaccacctgcaagtcgcactcgccgtcgccgccgccgcaacactgccagcaaattgactcccgccgccctggtgcggagagtgtaccgcgatggtcgcgctgaacctctgacgctgccgcgcgcgcgctaccatccaagcatcaccacttaatgactgttgacgctgcctccttgcagatatggccctcacttgccgccttcgcgtccccattactggctaccgaggaagaaactcgcgccgtagaaggatgttggggcgagggatgcgccgccacagacgaaggcgcgctatcagcagacgattagggggtggctttttgccagctcttatacccatcatcgccgcagcgatcggggcgataccaggcatagcttcagtggcggttcaggcctcgcagcgccactaacattggaaaaaacttataaataaaaaatagaatggactctgacgctcctggtcctgtgactatgtttttgtagagatggaagacatcaatttttcatccctggctccgcgacacggcacgaggccgtacatgggcacctggagcgacatcggcacgagccaactgaacgggggcgccttcaattggagcagtatctggagcgggcttaaaaattttggctcgaccgtaaaaacctatgggaacaaagcttggaacagcagcacagggcaggctctgagaaataagcttaaggaacaaaacttccaacagaaggtggtcgatgggatcgcctctggtattaacggcgtagtggatctggccaaccaggctgtacaaaaacagataaacagccgcctggacccgccgcccgcaacccctggtgaaatggaagtggaggaagaacttcctccgctggaaaagcggggcgacaagcgtccgcgacccgagctagagcagacgctggtgacgcgcgcagacgagcccccttcatatgaggaggcagtaaagctcggaatgcccactaccaggcctgtagctcacatggctaccggggtgatgaaaccttctcagtcacatcgacccgccaccttggacttgcctcctccccctgcttctgcggcgcctgttcccaaacctgtcgctaccagaaagcccaccgccgtacagcccgtcgccgtagccagaccgcgtcctgggggcacaccgcgcccgaaagcaaactggcaaagtactctgaacagcatcgtgggtctgggcgtgcagagtgtaaagcgccgtcgctgctattaattaaatatggagtagcgcttaacttgcttgtctgtgtgtatgtatcatcaccacgccgccgcagcagaggagaaaggaagaggtcgcgcgccgaggctgagttgctttcaagatggccaccccatcgatgatgccccaatgggcatacatgcacatcgccggacaggatgcttcggagtacctcagtccgggtctggtgcagttcgcccgtgcaacagacacctacttcagtatggggaacaaatttagaaaccccacagtggcgcccacccacgatgtgaccaccgaccgtagccagcgcctgatgctgcgcttcgtgcccgttgaccgggaagacaatacctactcttacaaagttcgctacacgctggctgtaggcgacaacagagtgcttgacatggccagcacattctttgacattcggggggtgcttgatagaggtcctagcttcaagccatattccggcacagcttacaattcactcgctcctaagggcgcgcccaatacatctcagtggatagttacaacaaatggggacaatgcagtaactaccaccacaaacacatttggcattgcttccatgaagggagacaatattactaaagaaggtttgcaaattgggaaagacattaccactactgaaggagaagaaaagcccatttatgccgataaaacatatcagccagagcctcaagttggagaagaatcatggactgatactgatggaacaaatgaaaagtttggtggaagagcccttaaaccagctaccaacatgaagccatgctacgggtcttttgcaagacctacaaacataaaagggggccaagctaaaaacagaaaagtaaaaccaacaaccgaaggaggggttgaaactgaggaaccagatattgatatggaatttttcgatggtagagatgctgttgcaggagctttagcgcctgaaattgtgctttatacggaaaatgtaaatttggaaactccagacagtcatgtggtatataaaccagaaacgtctaataactctcatgcaaatttgggtcaacaagccatgcctaacagacccaattacattggcttcagggataacttcgtaggcctaatgtactacaacagtactggaaatatgggagttttggctggccaagcatcacaactgaatgcagtggttgacttgcaggacagaaatactgaactgtcatatcagcttttgcttgattctctgggagacagaaccagatacttcagcatgtggaatcaggctgtggacagttacgatcccgatgttcgcattattgaaaatcatggcatcgaggatgaactgcctaattactgttttcctctgaatggcataggaccagggcacacatatcaaggcattaaagttaaaaccgatgacactaatggatgggaaaaagatgctaatgttgctccagctaatgaaataaccataggcaacaacctggctatggaaattaatatccaagctaacctttggagaagttttctgtactctaatgtggctttgtaccttccagatgtttacaagtacacgccacctaacattactttgcccactaacaccaacacctatgagtacatgaacgggcgagtggtatccccatccctggttgattcatacatcaacattggcgccaggtggtctcttgacccaatggacaatgtgaatccattcaaccaccaccgcaatgctggtctgcgctacaggtccatgcttctgggaaatggtcgttatgtgcctttccacatacaagtgcctcagaaattctttgctgtcaagaacctacttcttctacctggctcctacacctacgagtggaacttccgaaaggatgtgaacatggtcctgcaaagttcccttggaaatgacctcagaacggatggtgctaccataagtttcaccagcatcaatctctatgccaccttcttccccatggctcacaacacagcttccacccttgaagccatgctgcgcaacgataccaatgatcagtcatttaacgactacctctctgcagctaacatgctttaccccattcctgccaatgcaaccaacattccaatttccatcccatctcgcaactgggcagccttcaggggctggtccttcaccagactcaaaaccaaggagactccatctcttggatcagggttcgatccctacttcgtatattctggatctattccctacctggatggcaccttttaccttaaccacactttcaagaaggtctccatcatgtttgactcctcagtcagctggcctggcaatgacaggctgttgagtccaaatgagtttgaaatcaagcgcactgtggacggggaaggatacaacgtggcacaatgcaacatgaccaaagactggttcctggttcagatgcttgccaattacaacattggctaccagggcttttacatccctgagggatacaaggatcgcatgtactcctttttcagaaacttccagcctatgagcaggcaggtggttgatgaggttaattacactgactacaaagccgtcaccttaccataccaacacaacaactctggctttgtagggtaccttgcacctactatgagacaaggggaaccttacccagccaattatccatacccgctcatcggaactactgccgttaagagtgtcacccagaaaaagttcctgtgcgacaggaccatgtggcgcattcccttctccagcaacttcatgtccatgggggcccttaccgacctgggacagaacatgctctatgccaactcagcccatgcgctggacatgacttttgaggtggatcccatggatgagcccaccctgctttatcttcttttcgaagtcttcgacgtggtcagagtgcaccagccacaccgcggcgtcatcgaggccgtctacctgcgcacaccgttctcggccggcaacgccaccacataagaagcctcttgcttcttgcaagcagcagctgcagccatgacatgcgggtccggaaacggctccagcgagcaagagctcaaagccatcgtccgagacctgggctgcggaccctatttcctgggaacctttgacaagcgtttcccggggttcatggcccccgacaagctcgcctgcgccatagtcaacactgccggacgcgagacggggggagagcactggctggcttttggttggaacccgcgctacaacacctgctacctttttgatccttttgggttctcggatgagcggctcaaacagatttaccagtttgagtacgaggggctcctgcgtcgcagtgcccttgctaccaaagaccgctgcatcaccctggagaagtctacccaaagcgtgcagggtccgcgctcagccgcctgtggacttttttgctgtatgttccttcatgcctttgtgcactggcccgaccgccccatggacggaaaccccaccatgaagttgctgactggggtgtccaacagcatgctccaatcaccccaagtccagcccaccctgcgccgcaaccaggaggtgctataccgcttcctaaacacccactcatcttactttcgttctcaccgcgcgcgcattgaaagggccaccgcgtttgaccgtatggatatgcaataagtcatgtaaaaccgtgttcaataaacagcactttatttttacatgcactgaggctctggttttgctcatttgtttcatcatttactcagaagtcgaatgggttctggcgggagtcagagtgacccgcgggcagggatacgttgcggaactgtaacctgttctgccacttgaactcggggattaccagcttgggaactggaatctcgggaaaggtgtcttgccacaactttctggtcagttgcatagcgccaagcaggtcaggagcagagatcttgaaatcacagttggggccggcattctggacacgggagttgcgatacactgggttgcaacactggaacactatcaacgctgggtgtcttacgcttgccaacacggttgggtcactgatggtagtcacatccaagtcttcagcattggccatcccaaagggggtcatcttacatgtctgcctgcccatcacgggagcgcagcctggcttgtggttgcaatcacaatgaatggggatcagcatcatcctggcttggtcgggagttatccctgggtacacagccttcatgaaggcttcgtactgcttaaaagcttcctgggccttacttccctcggtgtagaacatcccacaggacttgctggaaaattgattagtagtacagttggcatcattcacacaacagcgggcatcgttgttggccaactgaaccacatttctgccccagcggttttgggtgatcttggctctgtctggattctccttcatagcgcgctgcccgttctcgctcgccacatccatctcgataatgtggtccttctggatcatgatagtgccatgcaggcatttcaccttgccttcataatcggtgcatccatgagcccacagagcgcacccggtgcactcccaattattgtgggcgatctcagaataataatgtaccaatccctgcatgaatcttcccatcattgttgtcaaggtcttcatgctggtaaatgtcagcgggatgccacggtgctcctcgttcacatactggtggcagatacgcttgtattgctcgtgctgctctggcatcagcttgaaagaggttctcagatcattatccagcctgtacctttccattagcacagccatcacttccatgcccttctcccaggcagataccaggggcagactcaaaggattcctaacagcaataaaagtagctcctttagctatagggtcattcttgtcgatcttctcaacacttctcttgccatccttctcaatgatgcgcaccggggggtagctgaagcccacggccaccaactgagcctgttctctttcttcttcactatcctggctgatgtcttgcagagggacatgcttggtcttcctgggcttcttcttgggagggatcgggggaggactgttgctccgctccggagacagggatgactgcgaagtttcgcttaccaataccacctggctctcggtagaagaaccggaccccacacgacggtaggtgttcctcttcgggggcagaggtggaggcgactgagatgggctgcggtctggccttggaggcggatggctggcagagctcattccgcgttcgggggtgtgctcccggtggcggtcgcttgactgatttcctccgcggctggccattgtgttctcctaggcagagaaacaacagacatggaaactcagccatcactgccaacatcgctgcaagcaccatcacacctcgcccccagcagcgacgaggaggagagcttaaccaccccaccacccagtcccgctaccaccacctctaccctcgatgatgaggaggaggtcgacgcagcccaggagatgcaggcgcaggataatgtgaaaacggaagagattgaggcagatgtcgagcaggacccgggctatgtgacgccggcggagcaccaggaggagctgaaacgctttctagacagagaggatgacgaccgcccagagcatcaagcagatggcgtttaccaggaggctgggatcagggatcatgtcgccgactacctcaccggccttggtggggaggacgtgctcctcaaacatctagcaaggcagtcgatcatagttaaagacgcattgctcgatctcactgaagtgcccatcagtgtggaagagcttagccgcgcctacgagctgaacctcttttcgcctcaggtaccccccaagcggcagccaaacggcacctgcgaggccaaccctcgactcaacttctatccagcttttactatccccgaagtgttggccacctaccacatctttttcaagaaccaaaagattccagtctcctgccgcgccaaccgcacccgcgccgatgccctgctcaacttgggtccgggagctcgcttacctgatatagcttccttggaagaggttccaaagatctttgagggtctgggaagtgatgagacacgggccgcaaatgctctgcaacagggagagaatgacatggatgaacaccacagcgctctggtggaactggagggtgacaatgcccggattgcagtgctcaagcgcagtatcgtggtcacccattttgcctaccccgctgttaacctgccccccaaagttatgagcgctgtcatggaccatctgctcatcaaacgagcaagacctctttcagaaaaccagaacatgcaggatccagacgcctcggacgagggcaagccggtagtcagtgacgagcagctatctcgctggctgggtaccaactccccccgagatttggaagagaggcgcaagcttatgatggctgtagtgctagtaactgtggagctggagtgtctgcgccgctttttcaccgaccctgagaccctgcgcaagctagaggagaacctgcactacacctttagacatggcttcgtgcggcaggcatgcaagatctccaacgtggagcttaccaacctggtttcttacatgggcattttgcatgagaaccgactagggcagagcgtcctgcacaccacccttaaaggggaggcccgccgtgactacatccgagactgtgtctacctctacctctgccatacctggcaaactggtatgggtgtgtggcaacagtgtttggaagagcagaacctaaaagagctggacaagctcttgcagagatccctcaaagccctgtggacaggttttgatgagcgcaccgtcgcctcggacctggcagacatcatcttccccgagcgtctcagggttactctgcgaaacggcctgccagactttatgagccagagcatgcttaacaactttcgctctttcatcctggaacgctccggtatcctgcctgccacctgctgtgcgctgccctccgactttgtgcctctcacctaccgcgagtgcccaccgccgctatggagccactgctacctgttccgcctggccaactacctctcctaccactcggatgttatagaggatgtgagcggagacggcctgctggaatgccactgccgctgcaatctttgcacaccccaccgctcccttgcctgcaacccccagttgctgagcgagacccagattatcggcaccttcgagctgcagggtcccagaagtaaaggcgaggggtcttctccggggcagagtttgaaactgacaccggggctgtggacctccgcctacctgcgcaagtttcaccccgaggactaccatccctatgagatcaggttctatgaggaccaatcacatcctcccaaagtcgagctctcagcctgcgtcatcacccagggagcaattctggcccaattgcaagccatccaaaaatctcgccaagaatttctgctaaaaaagggaaacggggtctaccttgaccctcagaccggtgaggagctcaacacaaggttcccccaggatgtcccatcgccgaggaagcaagaagttgaaggtgcagctgtcgcccccagaggatatgaaggaagactgggacagtcaggcagaggaggagatggaagattgggacagccaggcagaggaggtggacagcctggaggaagacagtttggaggaggaagacgaggaggcagaggaggtggaagaagcaaccgccgccaaacagttgtcatcggcggcggagacaagcaagtccccagacagcagcacggctaccatctccgctccgggtcggggggcccagcggcggcccaacagtagatgggacgagaccgggcgattcccaaacccgaccaccgcttccaagaccggtaagaaggagcgacagggatacaagtcctggcgtggacataaaaacgctatcatctcctgcttgcatgaatgcgggggcaacatatccttcacccggcgatacctgctcttccaccacggtgtaaacttcccccgcaatatcttgcattactaccgtcacctccacagcccctactgcagtcagcaagtcccggcaaccccgacagaaaaatacagcagcgacaacggtgaccagaaaaccagcagttagaaaatccacaacaagtgcaccaggaggaggactgaggatcacagcgaacgagccagcgcagaccagagagctgaggaaccggatctttccaaccctctatgccattttccagcagagtcgggggcaagagcaggaactgaaagtaaaaaaccgatctctgcgctcgctcaccagaagttgtttgtatcacaagagcgaagaccaacttcagcgcactctcgaggacgccgaggctctcttcaacaagtactgcgcgctgactcttaaagagtagcccttgcccgcgctcattttgaaaacggcgggaatcacgtcacccttggcacctgtcctttgcccttgtcatgagtaaagagattcccacgccttacatgtggagctatcagccccaaatggggttggcagcaggcgcttcccaggactactccacccgcatgaattggcttagcgccgggccctcaatgatatcacgggttaatgatatacgagcttatcgaaaccagttactcctagaacagtcagctctcaccaccacaccccgtcaacaccttaatccccgaaattggcccgccaccctggtgtaccaggaaaatcccgctcccaccaccgtactacttcctcgagacgcccaggccgaagttcagatgactaacgcaggtgtacagctggcgggcggttccgccctatgtcgtcaccgacctcaacagagtataaaacgcctggtgattagaggccgaggtatccagctcaacgacgagtcggttagctcttcgcttggtctgcgaccagacggagtcttccaaatcgccggctgtgggagatcttccttcactcctcgtcaggctgtgctgactttggagagttcgtcctcgcagccccgctcgggcggcattggaactctccagtttgtggaggagtttactccctctgtctacttcaaccccttctccggctctcctggccagtacccggacgagttcataccaaacttcgacgcaatcagcgagtcagtggatggctatgattgatgtctaatggtggtgcggctgagctagctcgactgcgacacctagaccactgccgccgctttcgctgcttcgcccgggaactcaccgagttcatctacttcgaactctccgaggagcaccctcagggtccggcccacggagtgcggattaccatcgaagggggaatagactctcgcctgcatcgcatcttctcccagcggcccgtgctaattgaacgcgaccagggaaatacaaccatctccatctactgcatctgtaaccaccccggattgcatgaaagcctttgctgtcttgtttgtgctgagtttaataaaaactgagttaagaccctcctacggactaccgcttcttcaatcaggactttacaacaccaaccagatcttccagaagacccagacccttcctcctttcatccaggactctaactctaccttaccagcaccctccactactaaccttcccgaaacaaacaagcttgcatctcatctgcaacaccgcctttcacgaagccttctttctgccaatactaccactcccaaaaccggaggtgagctccgcggtcttcctactgacgacccctgggtggtagcgggttttgtaacgttaggagtagttgcgggtgggcttgtgctgatcctttgctacctatacacaccttgctgtgcatatttagtcatattgtgctgttggtttaagaaatgggggccatactagtcgtgcttgctttactttcgcttttgggtctgggctctgctaatctcaatcctctcgatcacgatccatgtttagacttcgacccagaaaactgcacacttacttttgcacccgacacaagccgtctctgtggagttcttattaagtgcggatgggactgcaggtccgttgaaattacacataataacaaaacatggaacaataccttatccaccacatgggagccaggagttccccagtggtatactgtctctgtccgaggtcctgacggttccatccgcattagtaacaacactttcattttttctgaaatgtgcgatctggccatgttcatgagcagacagtatgacctatggcctcccagcaaagagaacattgtggcattttccattgcttattgcttggtaacatgcatcatcactgctatcatttgtgtgtgcatacacttgcttatagttattcgccctagacaaagcaatgaggaaaaagagaaaatgccttaacctttttcctcataccttttctttacagcatggcttctgttacagctctaattattgccagcattgtcactgtcgctcacgggcaaacaattgtccatattaccttaggacataatcacactcttgtagggcccccaattacttcagaggttatttggaccaaacttggaagtgttgattattttgatataatttgcaacaaaactaaaccaatatttgtaatctgtaacagacaaaatctcacgttaattaatgttagcaaaatttataacggttactattatggttatgacagatccagtagtcaatataaaaattacttagttcgcataactcagcccaaattaacagtgccaactatgacaataattaaaatggctaataaagcattagaaaattttacatcaccaacaacacccaatgaaaaaaacattccaaattcaatgattgcaattattgcggcggtggcattgggaatggcactaataataatatgcatgctcctatatgcttgttactataaaaagtttcaacataaacaggatccactactaaattttaacatttaattttttatacagatgatttccactacaatttttatcattactagccttgcagctgtaacttatggccgttcacacctaactgtacctgttggctcaacatgtacactacaaggaccccaagaaggctatgtcacttggtggagaatatatgataatggagggttcgctagaccatgtgatcagcctggtacaaaattttcatgcaacggaagagacttgaccattattaacataacatcaaatgagcaaggcttctattatggaaccaactataaaaatagtttagattacaacattattgtagtgccagccaccacttctgctccccgcaaatccactttctctagcagcagtgccaaagcaagcacaattcctaaaacagcttctgctatgttaaagcttccaaaaatcgctttaagtaattccacagccgctcccaatacaattcctaaatcaacaattggcatcattactgccgtggtagtgggattaatgattatatttttgtgtataatgtactacgcctgctgctatagaaaacatgaacaaaaaggtgatgcattactaaattttgatatttaattttttatagaattatgatattgtttcaatcaaataccactacctcctatgcatacacaaacattcagcctaaatacgctatgcaactagaaatcacaatactaattgtaattggaattcttatactatctgttattctttattttatattctgccgtcaaatacccaatgttcatagaaattctaaaagacgtcccatctattctcctatgattagtcgtccccatatggctctgaatgaaatctaagatctttttttttttctcttacagtatggtgaacatcaatcatgatccctagaaatttcttcttcaccatactcatctgtgcttttaatgtctgtgctactttcacagcagtagccactgcaagcccagactgtataggaccatttgcttcctatgcactttttgccttcgttacttgcatctgcgtgtgtagcatagtctgcctggttattaattttttccaactggtagactggatctttgtgcgaattgcctacctacgtcaccatcccgaataccgcaatcaaaatgttgcggcacttcttaggcttatttaaaaccatgcaggctatgctaccagtcattttaattttgctactaccctgcattcccctagcttccaccgccactcgcgctacacctgaacaacttagaaaatgcaaatttcaacaaccatggtcatttcttgattgctaccatgaaaaatctgattttcccacatactggatagtgattgttggaataattaacatactttcatgtacctttttctcaatcacaatataccccacatttaattttgggtggaattctcccaatgcactgggttacccacaagaaccagatgaacatattccactacaacacatacaacaaccactagcactggtacagtatgaaaatgagccacaaccttcactgccccctgccattagttacttcaacctaaccggcggagatgactgacccaatcgccacatcatccaccgctgccaaggagctgctggacatggacggacgtgcctcagaacagcgactcatccaactacgcattcgtcagcagcaggaacgagcagtaaaagagctaagggatgccattgggattcaccagtgcaaaaaaggcatattctgcttagtaaaacaatccaaaatctcctacgagatcaccgctactgaccatcgtctctcatacgagctcggtccgcagcgacaaaaattcacctgcatggtgggaatcaaccccatagttatcacccagcagtctggagatactaagggttgtatccagtgttcctgtgattccaccgagtgcatctacacactgctgaagaccctctgcggccttcgagacctcctacccatgaactaatcattgcccctaccttacccaatcaaaatattaataaagacacttacttgaaatcagcaatacagtctttgtcaaaactttctaccagcagcacctcaccctcttcccaactctggtactctaaacgtcggagggtggcatactttctccacactttgaaagggatgtcaaattttatttcctcttctttgcccacaatcttcatttctttatccccagatggccaagcgagctcggctaagcacttccttcaacccggtgtacccttatgaagatgaaagcagctcacaacacccatttataaatcctggtttcatttcccctgacgggttcacacaaagtccaaacggggttttaagtcttaaatgtgttaatccacttaccactgcaagcggctccctccaacttaaagtgggaagtggtcttacagtagacactactgatggatccttagaagaaaacatcaaagttaacacccccctaacaaagtcaaaccattctataaatttaccaataggaaacggtttgcaaatagaacaaaacaaactttgcagtaaactcggaaatggtcttacatttgactcttccaattctattgcactgaaaaataacactttatggacaggtccaaaaccagaagccaactgcataattgaatacgggaaacaaaacccagatagcaaactaactttaatccttgtaaaaaatggaggaattgttaatggatatgtaacgctaatgggagcctcagactacgttaacaccttatttaaaaacaaaaatgtctccattaatgtagaactatactttgatgccactggtcatatattaccagactcatcttctcttaaaacagatctagaactaaaatacaagcaaaccgctgactttagtgcaagaggttttatgccaagtactacagcgtatccatttgtccttcctaatgcgggaacacataatgaaaattatatttttggtcaatgctactacaaagcaagcgatggtgccctttttccgttggaagttactgttatgcttaataaacgcctgccagatagtcgcacatcctatgttatgacttttttatggtccttgaatgctggtctagctccagaaactactcaggcaaccctcataacctccccatttaccttttcctatattagagaagatgactgacaacaaaaataaagttcaacattttttattgaaattccttttacagtattcgagtagttattttgcctcccccttcccatttaacagaatacaccaatctctccccacgcacagctttaaacatttggataccattagagatagacatagttttagattccacattccaaacagtttcagagcgagccaatctggggtcagtaatacataaaaatgcatcgggatagtcttttaaagcgctttcacagtccaactgttgcggatgcgactccggagtctgaatcacggtcatctggaagaagaacgatgggaatcataatccgaaaacggaatcgggcgattgtgtctcatcaaacccacaagcaaccgctgtctgcgtcgctccgtgcgactgctgtttatgggatcggggtccgcagtgtcctgaagcatgattttaatagcccttaacattaactttctggtgcgatgcgcgcagcaacgcattctgatttcacttagattactacagtaggtacagcacattatcacaatattgtttaataaaccataattaaaagcgctccagccaaaactcatatctgatataatcgcccctgcatgaccatcataccaaagtttaatataaattaaatgtcgttccctcaaaaacacactacccacatacatgatctcttttggcatgtgcatattaacaatttgtctgtaccatggacaacgttggttaatcatgcaacccaatataaccttccggaaccacactgccaacaccgctcccccagccatgcattgaagtgaaccctgctgattacaatgacaatgaagaacccaattctctcgaccatgaatcacttgagactgaaaaatatctatagtagcacaacaaagacataaatgcatgcatcttctcataatttttaactcctctggatttaaaaacatatcccaaggaatgggaaactcttgcagaacagtaaagctggcagaacaaggaagaccacgaacacaacttacactatgcatagtcatagtatcacaatctggcaacagcgggtggtcttcagtcatagaagctcgggtttcattttcctcacatcgtggtaattgggctctggtgtaagggtgatgtctggcgcatgatgtggagcgtgcgcgcaaccttgtcataatggagttgcttcctgacattctcgtattttgtatagcaaaacgctgccctggcacaacacactcttcttcgtcttctatcctgccgcttagtgtgttccgtctgataattcaagtacagccacactcttaagttggtcaaaagaatgctggcttcagttgtaatcaaaactccatcatatttaattgttctaaggaaatcatccacggtagcatatgcaaatcccaaccaagcaatgcaactggattgcgtttcaagcagcagaggagagggaagagacggaagaatcatgttaatttttattccaaacgatctcgcagtacttcaaattgtagatcgcgcagatggcatctatcgcccccactgtgttggtgaaaaagcacagctaaatcaaaagaaatgcgattttcaaggtgctcaacggtggcttccaacaaagcctccacgcgcacatccaaaaacaaaagaataccaaaagaaggagcattttctaactcctcaaacatcatattacattcctgcaccattcccagataattttcagctttccagccttgaattattcgtgtcagttcttgtggtaaatccaaaccacacattacaaacaggtcccggagggcgccctccaccaccattcttaaacacaccctcataatgacaaaatatcttgctcctgtgtcacctgtagcaaattaagaatggcatcatcaattgacatgcccttggctctaagttcttctctaagttctagttgtagatactctctcatattatcaccaaactgcttagccagaagccccccgggaacaatagcaggggacgctacagtgcagtacaagcgcagacctccccaattggctccagcaaaaacaagattagaataagcatactgggaaccaccagtaatatcatcaaagttgctggaaatataatcaggcagagtttcttgtaaaaattgaataaaagaaaaattttccaaagaaacattcaaaaccgttgggatgcaaatacaataggttaccgcgctgcgctccaacattgttagttttgaattagtctgcaaaataaaagaaacaagcgtcatatcatagtagcctgtcgaacaggtggaaaaatcagtctttccatcacaagacaagccacagggtctccagctcgaccctcgtaaaacctgtcattgtgattaaacaacagcaccgaaagttcctcgcggtggccagcatgaataattcttgatgaagcatacaatccagacatgttagcatcagttaaagagaaaaaacagccaacatagcctctgggtataattatgcttaattttaagtatagcaaagccacccctcgcggatacaaagtaaaaggcacaggagaataaaaaatataattatttctctgctgctgttcaggcaacgttgctcccggtccctctaaatagacatacaaagcctcatcagccatggcttaccaggcaaagtacagcgggcgcacaaagcacaagctctaaagaagctctaaaaacactctccaacctctccacaatatatacacaagccctaaactgacgtaatgggagtaaagtgaaaaaaaaataccgccaagcccaacacacaccccgaaactgcgtcagcaggaaaaagtacagtttcacttccgcattcccaacaagcgtaacttcctctttctcatggtacgtcacatccgattaacttgcaacgtcattttcccacggtcgcgccgccccttttagccgttaaccccgcagccaatcaccacacagcgcgcacttttttaaattacctcatttacatgttggcaccattccatctataaggtatattatatagatag

SEQ ID NO: 264 - DNA, 35195 bp, Human adenovirus
  misc_feature 1..35195: note = Human adenovirus 7, GenBank Accession No. AY601634
  source 1..35195: mol_type = genomic DNA
catcatcaataatataccttatagatggaatggtgccaatatgtaaatgagggaatttaaaaaagtgcgcgctgtgtggtgattggctgtggggtgaacggctaaaatgggcggggcggccgtgggaaaatgacgtgacttatgtgggaggagctatgttgcaagttattgcggtaaatgtgacgtaaaacgaggtgtggtttgaacacggaagtagacagttttcccacgcttactgacaggatatgaggtagttttgggcggatgcaagtaaaaattctccatttttgcgcgaaaactgaatgaggaagtgaatttctgagtcatttcgcggttatgacagggtggagtatttgccgagggccgagtagactttgaccgtttacgtggaggtttcgattaccgtgtttttcacctaaatttccgcgtacggtgtcaaagtcctgtgtttttacgtaggtgtcagctgatcgctagggtatttaaacctgacgagttccgtcaagaggccactcttgagtgccagcgagaagagttttctcctccgcgccgcaagtcagttctgcgctttgaaaatgagacacctgcgtttcctgccacaggagattatctccagtgagaccgggatcgaaatactggagtttgtggtaaataccctaatgggagacgacccggaaccgccagtgcagcctttcgatccacctacgctgcacgatctgtatgatttagaggtagacgggcctgaggatcccaatgaggaagctgtgaatgggttttttactgattctatgctgctagctgccgatgaaggattggacataaaccctcctcctgagacccttgttaccccaggggtggttgtggaaagcggcagaggtgggaaaaaattgcctgatctgggagcagctgaaatggacttgcgttgttatgaagagggttttcctccgagtgatgatgaagatggggaaactgagcagtccatccataccgcagtgaatgagggagtaaaagctgccagcgatgtttttaagttggactgtccggagctgcctggacatggctgtaagtcttgtgaatttcacaggaataacactggaatgaaagaactattgtgctcgctttgctatatgagaatgcactgccactttatttacagtaagtgtatttaagtgaaatttaaaggaatagtgtagctgtttaataactgttgaatggtagatttatgttttttacttgtgattttttgtaggtcctgtgtctgatgatgagtcaccttctcctgattcaactacctcacctcctgaaattcaggcgcccgcacctgcaaacgtatgcaagcccattcctgtaaagcctaagcctgggaaacgccctgctgtggataagcttgaggacttgttggagggtggggatggacctttggaccttagtacccggaaactgccaaggcaataagtgccctgcagctgtgtttatttaatgtgacgtcatgtaataaaattatgtcagctgctgagtgttttattacttcttgggtggggacttggatatataagtaggagcagatctgtgtggttagctcacagcaacctgctgccatccatggaggtttgggctatcttggaagacctcagacagactaggctactgctagaaaacgcctcggacggagtctctggcctttggagattctggttcggtggtgatctagctaggctagtgtttaggataaaacaggactacagcgtagaatttgaaaagttattggacgacagtccaggactttttgaagctcttaacttgggtcatcaggctcattttaaggagaaggttttatcagttttagatttttctactcctggtagaactgctgctgctgtagcttttcttacttttatattggataaatggatccgccaaactcacttcagcaagggatacgttttggatttcatagcagcagctttgtggagaacatggaaggctcgcaggatgaggacaatcttagattactggccagtgcagcctctaggagtagcagggatactgagacacccaccgaccatgccagcggttctgcaggaggagcagcaggaggacaatccgagagccggcctggaccctccggtggaggagtagctgacctgtttcctgaactgcgacgggtgcttactaggtctacgaccagtggacagaacagaggcattaagagggagaggaatcctagtgggaataattcaagaaccgagttggctttaagtttaatgagccgcaggcgtcctgaaactgtttggtggcatgaggttcagagcgaaggcagggatgaagtttcaatattgcaggagaaatattcactagaacaacttaagacctgttggttggaacctgaggatgattgggaggtggccattaggaattatgctaagatatctctgaggcctgataaacaatatagaattactaagaagattaatattagaaatgcatgctacatatcagggaatggggcagaggttataatagatacacaagataaagcagcttttagatgttgtatgatgggtatgtggccaggggttgtcggcatggaagcagtaacacttatgaatattaggtttagaggggatgggtataatggcattgtatttatggctaacactaagctgattctacatggttgtagcttttttgggtttaataatacgtgtgtagaagcttgggggcaagttagtgtgaggggttgtagtttttatgcatgctggattgcaacatcaggtagggtcaagagtcagttgtctgtgaagaaatgcatgtttgagagatgtaatcttggcatactgaatgaaggtgaagcaaggatccgccactgcgcagctacagaaactggctgcttcattctaataaagggaaatgccagtgtgaagcataatatgatctgtggacattcggatgagaggccttatcagatgctgacctgcgctggtggacattgcaatattcttgctactgtgcatatcgtttcacatgcacgcaagaaatggcctgtatttgaacataatgtgattaccaagtgcaccatgcacataggtggtcgcaggggaatgtttatgccttaccagtgtaacatgaatcatgtgaaggtaatgttggaaccagatgccttttccagagtgagcttaacaggaatctttgatatgaatattcaactatggaagatcctgagatatgatgacactaaaccgagggtgcgcgcatgcgaatgcggaggcaagcatgctagattccagccggtgtgcgtggatgtgactgaagacctgagacccgatcatttggtgcttgcctgcactggagcggagttcggttccagtggtgaagaaactgactaaagtgagtagtggggcaagatgtggatggggactttcaggttggtaaggtggacagattgggtaaattttgttaatttctgtcttgcagctgccatgagtggaagcgcttcttttgaggggggagtatttagcccttatctgacgggcaggctcccaccatgggcaggagttcgtcagaatgtcatgggatccactgtggatgggagacccgtccagcccgccaattcctcaacgctgacctatgccactttgagttcgtcaccattggatgcagctgcagccgccgccgctactgctgccgccaacactatccttggaatgggctattacggaagcatcgttgccaattccagttcctctaataacccttcaaccctggctgaggacaagctacttgttctgttggctcagctcgaggccttaacccaacgcttaggcgaactgtctaagcaggtggcccagttgcgtgagcaaactgagtctgctgttgctacagcaaagtctaaataaagatctcaaatcaataaataaagaaatacttgtcataaaaacaaatgaatgtttatttgatttttcgcgcgcggtatgccctggaccatcggtctcgatcattgagaactcggtggatcttttccagtaccctgtaaaggtgggattgaatgtttagatacataggcattagtccgtctcgggggtggagatagctccattgaagagcctcttgctccggggtagtgttataaatcacccagtcatagcaaggtcggagtgcatggtgttgcacaatatcttttaggagcagactaattgcaacggggaggcccttagtgtaggtgtttacaaatctattgagctgggacgggtgcatccggggtgaaattatatgcattttggactggatcttgaggttggcaatgttgccgcctagatcccgtctcgggttcatattgtgcaggaccactaagacagtgtatccggtgcacttgggaaatttatcatgcagcttagagggaaaagcatgaaaaaatttggagacgcctttgtgaccccccagattctccatgcactcatccataatgatagcgatggggccgtgggcagcggcacgggcgaacacgttccgggggtctgaaacatcatagttatgctcctgagtcaggtcatcataagccattttaataaactttgggcggagggtgccagattgggggatgaaagttccctctggcccgggagcatagttcccctcacatatttgcatttcccaggctttcagttcagagggggggatcatgtccacctgcggggctataaaaaataccgtttctggagccggggtgattaactgggatgagagcaaattcctaagcagctgagacttgccgcacccagtgggaccgtaaatgaccccaattacgggttgcagatggtagtttagggagcgacagctgccgtcctcccggagtaggggggccacttcgttcatcatttcccttacatagatattttcccgcaccaagtccgttaggaggcgctctcccccaagggatagaagctcctggagcgaggagaagtttttcagcggcttcagcccgtcagccatgggcattttggaaagagtctgttgcaagagctcgagccggtcccagagctcggtgatgtgctctatggcatctcgatccagcagacctcctcgtttcgcgggttgggacggctcctggagtagggaatcagacgatgggcgtccagcgctgccagggtccgatccttccatggtcgcagcgtccgagttagggttgtttccgtcacggtgaatgggtgcgcgcctggttgggcgcttgcgagggtgcgcttcagactcatcctgctggtcgagaaccgctgccgatcggcgccctgcatgtcggccaggtagcagtttaccatgagttcgtagttgagcgcctcggccgcgtggcctttggcacggagcttacctttggaagttttatggcaggcggggcagtagatacatttgagggcatacagcttgggcgcgaggaaaatggattcgggggagtatgcattcgcaccgcaggaggcgcagacggtttcgcactccacgagccaggtcagatccggctcatcggggtcaaaaacaagttttccgccatgttttttgatgcgtttcttacctttggtttccatgaggtcgtgtccccgctgggtgacaaagaggctgtccgtgtccccgtagaccgactttatgggcctgtcctcgagcggagtgcctcggtcctcttcgtagaggaacccagcccactctgatacaaaagcgcgtgtccaggccagcacaaaggaggccacgtgggaggggtagcggtcgttgtcaaccagggggtccaccttctctacggtatgtaaacacatgtccccctcctccacatccaagaatgtgattggcttgtaagtgtaggccacgtgaccaggggtccccgccgggggggtataaaagggggcgggcctctgttcgtcctcactgtcttccggatcgctgtccaggagcgccagctgttggggtaggtattccctctcgaaggcgggcatgacctctgcactcaggttgtcagtttctaggaacgaggaggatttgatattgacagtaccagcagagatgcctttcataagactctcgtccatttggtcagaaaacacaatcttcttgttgtccagcttggtagcaaatgatccatagagggcattggatagaagcttggcgatggagcgcatggtttggttcttttccttgtccgcgcgctccttggcggcgatgttaagctggacgtactcgcgcgccacacatttccattcagggaagatggttgtcagttcatccggaactattctgactcgccatcccctattgtgcagggttatcagatccacactggtggccacctcgcctcggaggggctcattggtccagcagagtcgacctccttttcttgaacagaaaggggggagggggtctagcatgagctcatcaggggggtccgcatctatggtaaatattcccggtaacaaatctttgtcaaaatagctaatggtggtgggatcatccaaggtcatctgccattctcgaactgccagcgcgcgctcataggggttaagaggggtgccccagggcatggggtgggtgagcgcggaggcatacatgccacagatatcgtatacatagaggggctcttcgaggatgccgatgtaagtgggataacagcgcccccctctgatgcttgctcgcacatagtcatagagttcatgtgagggggcgagaagacccgggcccagattggtgcggttgggtttttccgccctgtaaacgatctggcgaaagatggcatgggaatttgaagagatagtaggtctctggaatatgttaaaatgggcatgaggtaggcctacagagtcccttatgaagtgggcatatgactcttgcagcttggctaccagctcggcggtgacgagtacatccagggcacagtagtcgagagtttcctggatgatgtcataacgcggttggcttttcttttcccacagctcgcggttgagaaggtattcttcgcgatccttccagtactcttcgaggggaaacccgtctttttctgcacggtaagagcccaacatgtagaactgattgactgccttgtagggacagcatcccttctccactgggagagagtatgcttgggctgcattgcgcagcgaggtatgagtgagggcaaaagtgtccctgaccatgactttgaggaattgatacttgaagtccatgtcatcacaggccccctgttcccagagttggaagtccacccgcttcttgtaggcggggttgggcaaagcgaaagtaacatcattgaagaggatcttgccggccctgggcatgaaatttcgggtgattctgaaaggctgagggacctctgctcggttattgataacctgagcggccaagacgatctcatcaaagccattgatgttgtgccccactatgtacagttctaagaatcgaggggtgcccctgacataaggcagcttcttgagttcttcaaaagtgagatctgtagggtcagtgagagcatagtgttcgagggcccattcgtgcacgtgagggttcgctttgaggaaggaggaccagaggtccactgcgagtgctgtttgtaactggtcccggtattgacgaaaatgctgcccgactgccattttttctggggtgacgcaatagaaggtttgggggtcctgccgccagcgatcccacttaagtttcatggcgaggtcataggcgatgttgacgagccgctggtctccagagagtttcatgaccagcatgaaggggattagctgcttgccaaaggaccccatccaggtgtaggtttccacatcgtaggtgaggaagagcctttctgtgcgaggatgagagccaatcgggaagaactggatctcctgccaccagttggaggaatggctgttgatgtgatggaagtagaactccctgcgacgcgccgagcattcatgcttgtgcttgtacagacggccgcagtactcgcagcgattcacgggatgcacctcatgaatgagttgtacctgacttcctttgacgagaaatttcagtggaaaattgaggcctggcgtttgtacctggcgctctactatgttgtctgcatcggcatgaccatcttctgtctcgatggtggtcatgctgacgagccctcgcgggaggcaagtccagacctcggcgcggcaggggcggagctcgaggacgagagcgtgcaggccggagctgtccagggtcctgagacgctgcggagtcaggttagtaggcagtgtcaggagattgacttgcatgatcttttcgagggcgtgagggaggttcagatggtacttgatctccacgggtccgttggtggagatgtcaatggcttgcagggttccgtgccccttgggcgctaccaccgtgcccttgtttttccttttgggcggcggtggctctgttgcttcttgcatgtttaggagcggtgtcgagggcgcgcaccgggcggcaggggcggctcgggacccggcggcatggctggcagtggtacgtcggcgccgcgcgcgggtaggttctggtactgcgccctgagaagactcgcatgtgcgacgacgcggcggttgacatcctggatctgacgcctctgggtgaaagctaccggccccgtgagcttgaacctgaaagagagttcaacagaatcaatctcggtatcgttgacggcggcttgcctaaggatttcttgcacgtcgccagagttatcctggtaggcgatctcggccatgaactgctggatctcttcctcttgaagatctccgcggcccgctctctcgacggtggccgcgaggtcgttggagatgcgcccaatgagttgagagaatgcattcatgcccgcctcgttccagacgcggctgtagaccacagcccccacgggatctctcgcgcgcataaccacctgggcgaggttaagctctacgtggcgggtgaagaccgcatagttgcataggcgctggaaaaggtagttgagtgtggtggcgatgtgctcggtgacgaagaaatacatgatccatcgtctcagcggcatctcgctgacatcgcccagcgcttccaagcgctccatggcctcgtagaagtccacggcaaagttgaaaaactgggagttacgcgcggacacggtcaactcctcttccagaagacggatgagttcggcaatggtggtgcgcacctcgcgctcgaaatcccccgggatttcttcctcaatctcttcttcttccactaacatctcttcctcttcaggtggggctgcaggaggagggggaacgcggcgacgccggcggcgcacgggcagacggtcgatgaatctttcaatgacctctccgcggcggcggcgcatggtctcggtgacggcacgaccgttctccctgggtctcagagtgaagacgcctccgcgcatctccctgaagtggtgactgggaggctctccgttgggcagggacaccgcgctgattatgcattttatcaattgccccgtaggtactccgcgcaaggacctgatcgtctcaagatccacgggatctgaaaacctttcgacgaaagcgtctaaccagtcgcaatcgcaaggtaggctgagcactgtttcttgcgggcgggggcggctagacgctcggtcggggttctctctttcttttccttcctcctcttgggaggatgagacgatgctgctggtgatgaaattaaaataggcagttttgagacggcggatggtggcgaggagcaccaggtctttgggtccggcttgttggatgcgcaggcgatgggccattccccaagcattatcctgacatctggccagatctttatagtagtcttgcatgagtcgttccacgggcacttcttcttcgcccgctctgccatgcatgcgagtgatcccgaacccgcgcatgggctggacaagtgccaggtccgctacaaccctttcggcgaggatggcttgctgcacctgggtgagggtggcttggaagtcgtcaaagtctacaaagcggtggtaggccccggtgttgattgtgtaggagcagttggccatgactgaccagttgactgtctggtgcccagggcgcacgagctcggtgtacttgaggcgcgagtatgcgcgggtgtcaaagatgtaatcgttgcaggtgcgcaccaggtactggtagccgatgagaaagtgtggcggtggctggcggtacaggggccatcgctctgtagccggggctccgggggcaaggtcttccagcatgaggcggtggtaaccgtagatgtacctggacatccaggtgataccggaggcggtggtggatgcccgcgggaactcgcgtacgcggttccagatgttgcgcagcggcatgaagtagttcatggtaggcacggtttggcccgtgagacgtgcacagtcgttgatgctctagacatacgggcaaaaacgaaagcggtcagcggctcgtctccgtggcctggaggctaagcgaacgggttgggctgcgcgtgtaccccggttcgaatctcggatcaggctggagccgcagctaacgtggtactggcactcccgtctcgacccaggcctgcacaaaacctccaggatacggaggcgggtcgtttttttgctttttcctggatgggagccagtgctgcgtcaagctttagaacactcagttctcggggctgggagtggctcgcgcccgtagtctggagaattaatcgccagggttgcgttgcggtgtgccccggttcgagtcttagcgcgccggatcggccggtttccgcgacttctccagtttacgggagcgagccctctttttttttttgttttttgttgcccagatgcatcccgtgctgcgacagatgcgcccccagcaacagcccccttctcagcagcagctacaacgacagccacaaaaggctcttcctgctcctgtaactactgcggctgcagccgtcagcggcgcgggacagcccgcctatgatctggaattggaagagggcgagggactggcgcgcctgggcgcaccatcgcccgagcggcacccgcgggtgcaactgaaaaaggactctagcgaggcgtacgtgccccagcagaacctgttcagggacaggagcggtgaggagccagaggagatgcgagcatctcgatttaacgcgggtcgcgagctgcgccacggtctggatcgaagacgggtgctgcaagacgaggattttgaggtcgatgaagtgacagggatcagcccagctagggcacatgtggccgcggccaacctagtctcagcctacgagcagaccgtgaaggaggagcgcaacttccaaaaatcttttaacaaccatgtgcgcaccctgatcgcccgcgaggaagtgaccctgggtctgatgcatctgtgggacctgatggaggctatcacccagaaccccactagcaaacccctgacagctcagctgtttctggtggttcaacatagcagggacaacgaggcattcagggaggcgttgttgaacatcaccgagcctgatgggagatggctgtatgatctgatcaacatcctgcaaagtattatagtgcaggaacgtagcctgggtttggctgagaaagtggcagctatcaactactcggtcttgagcctgggcaaatactacgctcgcaagatctacaagaccccctacgtacccatagacaaggaggtaaagatagatgggttttacatgcgcatgactctcaaggtgctgactttgagcgacgatctgggggtgtatcgcaatgacaggatgcaccgtgcggtgagcgccagcaggaggcgcgagctgagcgacagagaacttatgcacagcttgcaaagagctctaacgggggctgggaccgatggggagaactactttgacatgggagcggacttgcaatggcaacccagtcgcagggccatggaggctgcagggtgtgagcttccttacatagaagaggtggatgaagtcgaggacgaggagggcgagtacttggaagactgatggcgcgacccgtatttttgctagatggaacagcagcaggcaccggaccccgcaatgcgggcggcgctgcagagccagccgtccggcattaactcctcggacgattggacccaggccatgcaacgcataatggcgctgacgacccgcaaccccgaagcctttagacagcaaccccaggccaaccgcctttcggctatactggaggccgtagtgccctcccgctccaaccccacccacgagaaggtcctggctatcgtgaacgcgctggtggagaacaaggccatccgtcccgatgaggccgggctggtatacaatgctctcttggagcgcgtggcccgttacaacagcagcaacgtgcagaccaacctggaccggatggtgaccgatgtgcgcgaggccgtgtctcagcgcgagcggttccagcgcgacgccaacttgggatcgttggtagcgctaaacgctttcctcagcacccagcccgctaacgtgccccgtggtcagcaagactatacaaactttttgagtgcattgagactcatggtagctgaggtgcctcagagcgaggtgtaccagtccgggccagattacttcttccagaccagcagacagggcttgcagacagtgaacctgactcaggctttcaagaacctgaagggtctctggggagtgcacgccccagtaggggatcgcgcgaccgtgtctagcttgctgactcccaactcccgcctgctgctgctgctggtatccccctttactgacagcggtagcatcgaccgcaactcgtacttgggctacctgcttaacctgtatcgcgaggccatagggcagagccaggtggacgagcagacctatcaagaaatcacccaagtgagccgcgccctgggtcaggaagacacgggcagtttggaagccaccctgaacttcttgctaaccaaccggtcgcagaagatccctcctcagtatgcgcttaccgctgaggaggagcggatcctcagatacgtgcaacagagcgttggactgtttctgatgcaggagggggcgacacctaccgccgcgctggacatgacagctcgaaacatggagcccagcatgtatgctagtaacaggcctttcattaacaaactgctggactacctgcacagggcggccgccatgaactctgattatttcaccaatgctatcctgaacccacactggctgcccccacctggtttctacactggcgagtacgacatgcccgaccccaatgacgggttcctgtgggacgatgtggacagcagcatattctccccgccttttggttatacagtttggaagaaggaagggggcgatagaagacactcttccgtgtcgctgtccagaacggctggtgctgccgcgaccgtgcccgaagctgcaagtcctttccctagcttgcccttttcactaaacagcgttcgcagcagtgaactggggagaataacccgcccgcgcttgatgggcgaggatgagtacttgaatgactctttgttgaggccagagagggaaaagaacttccccaacaatggaatagagagcctggtggataagatgagtagatggaagacctatgcgcaggatcacagagacgagcccaaaatcttgggggctacaagcagaccgacccgtagacgccagcgccacgacagacagatgggtcttgtgtgggacgatgaggactctgccgatgatagcagcgtgttggacttgggtggaagaggagggggcaacccgttcgctcatctgcgtcccagattcgggcgcatgttgtaaaagtgaaagtaaaataaaaatgcaactcaccaaggccatggcgaccgagcgtgcgttcgttcttttttgttatctgtgtttagtacgatgaggagacgagccgtgctaggcggagcggtggtgtatccggagggtcctcctccttcttacgagagcgtgatgcagcaacaggcggcgatgctacagcccccactggaggttcccttcgtacccccgcggtacctggcgcctacggaagggagaaacagcattcgttactcggagctgtcgcctctgtacgataccaccaagttgtatctggtggacaacaagtcggcggacattgcctccctgaactatcagaacgaccacagcaacttcctgaccacggtggtgcagaacaatgactttacccccacggaggctagcacccagaccatcaactttgacgagcggtcgcgatggggcggtcagctgaagaccatcatgcacaccaacatgcccaacgtgaacgagtacatgttcagcaacaagttcaaggcgagggtgatggtgtccagaaaagctcctgaaggtgttatagtaaatgacacctatgatcataaagaggatatcttaaagtatgagtggtttgagttcactttaccagaaggcaacttctcagccaccatgaccattgacctgatgaacaatgccatcattgacaactacctggaaattggcagacaaaatggagtgctggaaagtgacattggtgttaagtttgacactagaaactttaggctcgggtgggaccccgaaactaagttgattatgccaggagtctacacttatgaggcattccatcctgacattgtattgctgcctggttgcggggtagactttactgaaagccgacttagcaacttgcttggcatcaggaaaagacatccattccaggagggtttcaaaatcatgtatgaagatcttgaagggggtaatattcctgcccttttggatgtcactgcctatgaggaaagcaaaaaggataccactactgaaacaaccacactggctgttgcagaggtaactagtgaagatgataatataactagaggagatacttatataactgaaaaacaaaaacgtgaagctgcagctgctgaagttaaaaaagagttaaagatccaacctctagaaaaagacagcaagagtagaagctacaatgtcttggaagacaaaatcaacacggcctaccgcagctggtacctgtcctacaattacggtaaccccgagaaaggaataaggtcttggacactgcttaccacttcagatgtcacctgtggggcagagcaggtctactggtcgctccctgacatgatgcaagacccagtcaccttccgctccacaagacaagtcaacaactacccagtggtgggtgcagagcttatgcccgtcttctcaaagagtttctacaatgagcaagccgtgtactctcagcagctccgacaggccacttcgctcacgcacgtcttcaaccgcttccctgagaaccagatcctcatccgcccgccggcgcccacaattaccaccgtcagtgaaaacgttcctgctctcacagatcacgggaccctgccgttacgcagcagtatccggggagtccagcgcgtgaccgttactgacgccagacgccgcacctgtccctacgtttacaaggccctgggcatagtcgcgccgcgcgttctttcaagccgcactttctaaaaaaaaaaaaaatgtccattctcatctcgcccagtaataataccggttggggactgtatgcgcccaccaagatgtatggaggcgcccgcatacgctctacccagcaccctgtgcgcgttcgcggtcatttccgcgctccatggggcgcactcaagggtcgtacccgcactcggaccacggtcgatgatgtgatcgaccaggtggtcgccgatgctcgtaattatactcctactgcgcctacatctactgtggatgcagttattgacagtgtggtggcagacgcccgcgcctatgctcgccggaagagccgaaggaggcgcattgccaggcgccacagggctactaccgccatgcgagctgcaaaagctattctgcggagggccaaacgtgtggggcgaagagccatgcttagagcggccagacgcgcggctttaggtgccagcagcggcaggtcccgcaggcgcgcggccacggcggcagcagcggccattgccaacatggcccaaccgcgaagaggcaatgtgtactgggtgcgtgatgccactaccggccagcgcgtgcccgtgcgcacccgcccccctcgcacttagaagatactgagcagtctccgatgttgtgtcccagcggcaagtatgtccaagcgcaaatacaaggaagagatgctccaggtcatcgcgcctgaaatctacggtccaccggtgaaggatgaaaaaaagccccgcaaaatcaagcgggtcaaaaataacaaaaaggaagaagatgacgatgatgggctggtggagtttgtgcgcgagttcgccccaagacggcgcgtgcagtggcgcgggcgcaaagtgcgtcaagtgctcagacccggaaccactgtggtttttacacctggcgagcgttccagcactacttttaaacggtcctatgatgaggtgtacggggatgacgatattcttgagcaggcggcagaccgccttgatgagtttgcttatggcaagcgcactagatccagtcccaaagaggaggctgtgtccattcccttggatcatggaaatcccacccccagcctcaaaccagtcaccttgcagcaagtgctgcccgtgcctgcgcggagaggcgtaaagcgcgagggtgaggacctatatcctaccatgcagctaatggtgcccaagcgccagaggctagaagacgtactggagaaaatgaaagtggatcccgatatccagcctgaggtcaaagtaagacctatcaaggaagtggcgccaggtttgggagtacaaaccttcgacatcaagattcccaccgagtccatggaagtgcagaccgaacctgcaaaacccacaaccacctcaattgaggtgcaaacggaaccctggacgcccgcgcccgttgtcgcccccagcaccactcgaagatcacgacgaaagtacggcccagcaagtcttctaatgcccaactatgctctgcacccatccatcattcccactccgggttacagaggcactcgctactatcgaaaccggagcaacacctctcgccgccgcaaaccacctgcaagtcgcactcgcagtcgccgccgccgcaacactgccagcaaagtgactcccgccgccctggtgcggagagtgtaccgcgatggtcgcgctgaacctctgacgctgccgcgcgcgcgctaccatccaagcatcaccacttaatgactgttgacgctgcctccttgcagatatggccctcacttgccgccttcgcgtccccattactggctaccgaggaagaaactcgcgccgtagaaggatgttggggcgagggatgcgccgccacagacgaaggcgcgctatcagcagacgattagggggtggctttttgccagctcttatacccatcatcgccgcagcgatcggggcgataccaggcatagcttccgtggcggttcaggcctcgcagcgccactaacattggaaaaaacttataaataaaaaatagaatggactctgacgctcctggtcctgtgactatgtttttgtagagatggaagacatcaatttttcatccctggctccgcgacacggcacgaggccgtacatgggcacctggagcgacatcggcacgagccaactgaacgggggcgccttcaattggagcagtatctggagcgggcttaaaaattttggctcgaccgtaaaaacctatgggaacaaagcttggaacagcagcacagggcaggctctgagaaataagcttaaggaacaaaacttccaacagaaggtggtcgatgggatcgcctctggtattaacggcgtagtggatttggccaaccaggctgtacaaaaacagataaacagccgcctggacccgccgcccgcaacccctggtgaaatggaagtggaggaagaacttcctccgctggaaaagcggggcgacaagcgtccgcgacccgagctggagcagacgctggtgacgcgcgcagacgagcccccttcatacgaggaggcagtaaagctcggaatgcccactaccaggcctgtagctcacatggctaccggggtaatgaaaccttctcagacacatcgacccgccaccttggacttgcctcctccccctgcttctgcggcacctgttcccaaacctgtcgctaccagaaagcccaccgccgtacagcccgtcgccgtagccagaccgcgcccgaaagcaaactggcaaagtactctgaacagcatcgtgggtctgggcgtgcagagtgtaaagcgccgtcgctgctattaattaaatatggagtagcgcttaacttgcttgtctgtgtgtatgtatcatcaccacgccgccgcagcagaggagaaaggaagaggtcgcgcgccgaggctgagttgctttcaagatggccaccccatcgatgatgccccaatgggcatacatgcacatcgccggacaggatgcttcggagtacctgagtccgggtctggtgcagttcgcccgtgcaacagacacctacttcagtatggggaacaagtttagaaaccccacagtggcgcccacccacgatgtgaccaccgaccgtagccagcgactgatgctgcgcttcgtgcccgttgaccgggaggacaatacatactcttacaaagtgcggtacaccctcgccgtgggcgacaacagagtgcttgacatggccagcacattctttgacattaggggggtgcttgatagaggtcctagcttcaagccatattccggcacagcttacaattcactggctcctaagggcgcgcctaacacatctcagtggatagttacaacgggagaagacaatgccaccacatacacatttggcattgcttccacgaagggagacaatattactaaggaaggtttagaaattgggaaagacattactgcagacaacaagcccatttatgccgataaaacatatcagccagagcctcaagttggagaagaatcatggactgatattgatggaacaaatgaaaaatttggaggtagagctcttaaaccagctactaaaatgaagccatgctacgggtcttttgcaagacctacaaacataaaagggggccaagctaaaaacagaaaagtaacaccaaccgaaggagatgttgaagctgaggagccagatattgatatggaatttttcgatggtagagaagctgctgacgctttttcgcctgaaattgtgctttacacggaaaatgtcaatttggaaactccagacagccatgtggtatacaagccaggaacttctgatggtaactctcatgcaaatttgggtcaacaagccatgcctaacagacccaattacattggcttcagggataactttgtaggtcttatgtactacaacagtactggaaatatgggagttttggccggccaagcatcacaactgaatgcagtggttgacttgcaggacagaaacactgaactgtcatatcagcttttgcttgattctctgggagacagaagcagatacttcagcatgtggaatcaggctgtggacagctatgatcccgatgttcgtattattgaaaatcatggcgtcgaggatgaactgcctaattactgttttcctctggatggcataggaccagggaacaaatatcaaggcattaaacctagagacactgcatgggaaaaagatactaaagtttatacagctaatgaaatagccataggcaacaatctggctatggaaattaatatccaagctaatctttggagaagttttctgtactccaatgtggctttgtaccttccagatgtttacaagtacacgccaactaacattactctgcccgctaacaccaacacctatgagtacatgaacgggcgagtggtttccccatctctggtcgattcatacatcaacattggcgccaggtggtctcttgacccaatggacaatgtgaatccatttaaccaccaccgcaatgctggcctacgctaccggtccatgcttctgggcaatggccgttatgtgcctttccacatacaagtgcctcaaaaattctttgctgtcaagaacctacttcttctacctggctcctacacctatgagtggaacttcagaaaggatgtgaacatggtcctgcaaagttcccttggaaatgacctcagaacagatggtgctaccataagtttcaccagcatcaacctctatgccaccttcttccccatggctcacaacaccgcttcaactcttgaagccatgctgcgcaacgataccaatgatcagtcattcaacgactacctctctgcagctaacatgctttaccccatccctgccaatgcaaccaacattccaatttccatcccatctcgcaactgggcagccttcaggggctggtccttcaccagactcaaaaccaaggagactccatctcttggatcagggttcgatccctacttcgtttattctggatctattccctacctggatggcactttttaccttaaccacactttcaagaaggtctccatcatgtttgactcctcagtcagctggcctggcaatgacaggctgttgtctccaaatgagtttgaaatcaagcgcactgtggatggggaaggatacaatgtggcccaatgcaacatgaccaaagactggttcctggttcagatgcttgccaactacaacattggctaccagggcttttacatccctgagggatacaaggatcgcatgtactcctttttcagaaacttccagcctatgagcaggcaggtggttgatgaggttaattacactgactacaaagccgtcaccttaccatatcaacacaacaactctggctttgtaggataccttgcgcctactatgagacaaggggaaccttacccagccaattatccatacccgctcatcggaactactgccgttaaaagtgttacccaaaaaaagttcctgtgcgacaggaccatgtggcgcataccgttctccagcaacttcatgtccatgggagcccttacggacctgggacagaacctgctctatgccaactcggcccatgcgctggacatgacttttgaggtggatcccatggatgagcccaccctgctttatcttcttttcgaagtcttcgacgtggtcagagtgcaccagccacaccgcggcgtcatcgaggccgtctacctgcgcacaccgttctcggccggcaacgccaccacataagaagcctcttgcttcttgcaagcagcagctgcagccatgtcatgcgggtccggaaacggctccagcgagcaagagctcaaagccatcgtccgagacctgggttgcggaccctatttcctgggaacctttgacaagcgtttcccggggttcatggcccccgacaagctcgcctgcgccatagtcaacactgccggacgcgagacggggggagagcactggctggcttttggttggaacccgcgctccaacacctgctacctttttgatccttttgggttctcggatgagcgactcaaacagatttaccagtttgagtacgaggggctcctgcgccgcagtgcccttgctaccaaagaccgctgcatcaccctggaaaagtccacccagagcgtgcagggcccacgctcagccgcctgtggacttttttgctgtatgttccttcatgcctttgtgcactggcccgaccgccccatgaacggaaaccccaccatgaagttgctgactggggtgcccaacagcatgctccaatctccccaagtgcagcccaccctgcgccgcaaccaggaggcgctatatcgcttcctaaacacccactcatcttactttcgttctcaccgcgcacgcatcgaaagggccaccgcgtttgaccgtatggatatgcaataagtcatgtaaaaccgtgttcaataaaaagcactttatttttacatgcactaaggctctcgttttttactcattcgttttcattattcactcagaaatcaaatgggttctggcgggagtcaaagtgacccgcgggcagggatacgttgcggaactgtaacctgttctgccacttgaactcggggatcaccaacttgggaactggaatctcgggaaaggtgtcttgccacaactttctggtcagctgcagggcgccaagtaggtcaggagcagagatcttgaaatcacagttgggaccggcattctggacacgggagttgcggtacactgggttgcaacactggaacaccatcaaggctgggtgtctcacgcttgccagcacggtcgggtcactgatggtagtcacatccaagtcttcagcattggccatcccaaagggggtcatcttacaggtctgcctgcccatcacgggagcgcagcctggcttgtggttgcaatcgcaatgaatggggatcagcatcatcctggcttggtcgggggttatccctgggtacacggccttcatgaaggcttcgtactgcttgaaagcttcctgagccttacttccctcggtatagaacatcccacaggacttgctggaaaattgattagtagcacagttggcatcatttacacagcagcgggcatcgttgttggccaactggaccacatttctgccccagcggttctgggtgatcttggctctgtctgggttctccttcatagcgcgctgtccgttctcgctcgccacatccatctcgataatgtggtccttctgaatcatgatagtgccatgcaggcatttcaccttgccttcataatcggtgcatccatgagcccacagagcgcacccggtgcactcccaactattgtgggcgatctcagaataagaatgtaccaatccctgcatgaatcttcccatcatcactgtcagggtcttcatgctactaaatgtcagcgggatgccacggtgctcctcgttcacatactggtggcagatacgcttgtactgctcgtgctgctctggcatcagcttgaaagaggttctcaggtcattatccagcctgtacctctccattagcacagccatcacttccatgcccttctcccaggcagataccaggggcaagctcaaaggattcctaacagcaatagaagtagctcctttagctatagggtcattcttgtcgatcttctcaacacttctcttgccatccttctcaatgatgcgcaccggggggtagctgaagcccacggccaccaactgagcctgttctctttcttcttcgctgtcgtggccgatgtcttgcagagggacatgcttggtctttctgggcttcttcttgggagggatcgggggaggactgttgctccgttccggagacagggatgaccgcgaagtttcgcttaccagtaccacctggctctcgatagaagaatcggaccccacgcgacggtaggtgttcctcttcgggggcagaggtggaggcgactgagatgggctgcggtctggccttggaagcggatggctggcagagcccattccgcgttcgggggtgtgctcccgttggcggtcgcttgactgatttcctccgcggctggccattgtgttctcctaggcagagaaacaacagacatggaaactcagccatcactgccaacatcgctgcaagcgccatcacacctcgcccccagcagcgacgaggaggagagcttaaccaccccaccacccagtccagctaccaccacctctaccctcgatgatgaggaggaggaggtcgacgcagcccaggagatgcaggcgcaggataatgtgaaagcggaagagattgaggcagatgtcgagcaggacccgggctatgtgacaccggcggagcacgaggaggagctgaaacgttttctagacagagaggatgacgaccgcccagagcatcaagcagatggcgatcaccaggaggctggcatcggggatcaagttgccgactacctcaccgggcttgggggggaagacgtgctcctcaaacatctagcaaggcagtccaacatagttaaagacgcactactcgacctcaccgaagtgcccatcagtgtggaagagcttagccgcgcctacgagctgaacctcttttcgcctcacataccccccaagcggcagccaaacggcacctgcgaggccaaccctcgactgaacttctatccagcttttactgtccccgaagtgctggccacctaccacatcttttttaagaaccaaaagattccagtctcctgccgcgccaaccgcacccgcgccgatgcccttctcaacttgggtccgggagctcgcttacctgatatagcttccttggaagaggttccaaaaatctttgagggtctgggaagtgatgagactcgggccgcaaatgctctgcaacagggagagaatggcatggatgaacatcacagcgctttagtggaactggagggtgacaatgcccggcttgcagtgctcaagcgcagtatcgtggtcacccattttgcctaccccgctgttaacctgccccccaaagttatgagcgctgttatggaccatctgctcatcaaacgagcaagacccctttcagaaaaccagaacatgcaggatccagacgcctcggacgagggcaagccggtagtcagtgacgagcagctatctcgctggctgggtaccaactccccccgagatttggaagagaggcgcaagcttatgatggctgtagtgctagtaactgtggagctggagtgtctgcgccgctttttcaccgaccctgagaccctgcgcaagctagaggagaacctgcactacacctttagacatggcttcgtgcggcaggcatgcaagatctccaacgtggagcttaccaacctggtttcttacatgggcattttgcatgagaaccggctagggcagagcgtcctgcacaccacccttaaaggggaggcccgccgtgactacatccgagactgtgtctacctttacctctgccatacctggcagactggcatgggtgtgtggcaacagtgtttggaagagcagaacctaaaagagctggacaagctcttgcagagatccctcaaagccctgtggacaggttttgatgagcgcaccgtcgcctcggacctggcagacatcatcttccccgagcgtctcagggttactctgcgaaacggcctgccagactttatgagccagagcatgcttaacaactttcgctctttcatcctggaacgctccggtatcctgcctgccacctgctgtgcgctgccctccgactttgtgcctctcacctaccgcgagtgcccaccgccgctatggagccactgctacctgttccgcctggccaactacctctcctaccactcggatgttatagaggatgtgagcggagacggtctgctggaatgccactgccgctgcaatctttgcacaccccaccgctcccttgcctgcaacccccagttgctgagcgagacccagatcatcggcaccttcgagttgcagggtcccagcagtgaaggcgaggggtcttctccggggcagagtctgaaactgacaccggggctgtggacctccgcctacctgcgcaagtttcatcccgaggattaccacccctatgagatcaggttctatgaggaccagtcacatcctcccaaagtcgagctctcagcctgcgtcatcacccagggagcaattctggcccaattgcaagccatccaaaaatcccgccaagaatttctactgaaaaagggaagcggggtctaccttgacccccagaccggtgaggagctcaacacaaggttcccccaggatgtcccatcgccgaggaagcaagaagctgaaggtgcagctgacgcccccagaggatatggaggaagactgggacagtcaggcagaggaggagatggaagattgggacagccaggcagaggaggtggacagcctggaggaagacagtttggaggaggaagacgaggaggcagaggaggtggaagaagcaaccgccgccaaacagttgtcatcggcggcggagacaagcaagtccccagacagcagcacggctaccatctccgctccgggtcggggggtccagcggcggcccaacagtagatgggacgagaccgggcgattcccaaacccgaccaccgcttccaaaaccggtaagaaggagcgacagggatacaagtcctggcgtggacacaaaaacgctatcatctcctgcttgcatgaatgcgggggcaacatatccttcacccggcgatacctgctcttccaccacggtgtgaacttcccccgcaatatcttgcattactaccgtcacctccacagcccctactgcagtcagcaagtcccggcaaccccgacagaaaaagacagcagcgacaacggtgaccagaaaaccagcagttagaaaatctacaacaagtgcagcaggaggaggactgaggatcacagcgaacgagccagcgcagaccagagagctgaggaaccggatctttccaaccctctatgccatcttccagcagagtcgggggcaagagcaggaactgaaagtaaaaaaccgatctctgcgctcgctcaccagaagttgtttgtatcacaagagcgaagaccaacttcagcgcactctggaggacgccgaggctctcttcaacaagtactgcgcgctgactcttaaagagtagcccttgcccgcgcttattcgaaaacggcgggaatcacgtcaccattggcacctgtcctttgccctagtcatgagtaaagagattcccacgccttacatgtggagctatcagccccaaatggggttggcagcaggcgcctcccaggactactccacccgcatgaattggcttagcgccgggccctcaatgatatcacgggttaatgatatacgagcttatcgaaaccagttactcctagaacagtcagctctcaccaccacaccccgccaacaccttaatccccgaaattggcccgccgccctggtgtaccaggaaactcccgctcccaccaccgtactacttcctcgagacgcccaggccgaagttcagatgactaacgcaggtgtacagctggcgggcggttccgccctatgtcgtcaccgacctcaacagagtataaaacgcctggtgatcagaggccgaggtatccagctcaacgacgagtcggttagctcttcgcttggtctgcgaccagacggagtcttccagatcgccggctgtgggagatcttccttcacccctcgtcaggctgtactgactttggagagttcgtcctcgcagccacgctcgggcggcatcggaactctccagttcgtggaggagtttactccctctgtctacttcaaccccttctccggctctcctggccagtacccagacgagttcataccgaacttcgacgcaatcagcgagtcagtggatggctatgattgatgtctaatggtggcgcggctgagctagctcgactgcgacacctagaccactgccgccgctttcgctgcttcgcccgggaactcaccgagttcatctacttcgaactccccgaggagcaccctcagggtccggcccacggagtgcggattaccatcgaagggggaatagactctcgcctgcatcgaatcttctcccagcgacccgtgctgattgagcgcgaccagggaaatacaaccatctccatttactgcatctgtaaccaccccggattgcatgaaagcctttgctgtcttgtttgtgctgagtttaataaaaactgagttaagaccctcctacggactaccgcttcttcaatcaggactttacaacaccaaccagatcttccagaagacccagacccttcctcctctgatccaggactctaactctaccttaccagcaccatccactactaaccttcccgaaactaacaagcttggatctcatctgcaacaccgcctttcacgaagccttctttctgccaatactaccactcccaaaaccggaggtgagctccgcggtctccctactgacgacccctgggtggtagcgggttttgtaacgttaggagtagttgcgggtgggcttgtgctaatcctttgctacctatacataccttgctgtgcatatttagtcatattgcgctgttggtttaaaaaatgggggccatattagtcgtgcttgctttactttcgcttttgggtctgggctctgctaatctcaatcctcttgatcacgatccatgtctagacttcgacccagaaaactgcacacttacttttgcacccgacacaagccgtctctgtggagttcttattaagtgcggatgggactgcaggtccgttgaaattacacataataataaaacatggaacaataccttatccaccacatgggagccaggagttcccgagtggtatactgtctctgtccgaggtcctgacggttccatccgcattagtaacaacacttttattttttctgaaatgtgcgatctggccatgttcatgagcagacagtatgacctatggcctcccagcaaagagaacattgtggcattttccattgcttattgcttggtaacatgcatcatcactgctatcatttgtgtgtgcatacacttgcttatagttattcgccctagacaaagcaataaggaaaaagagaaaatgccttaacctttttactcataccttttctttacagcatggcttttgttacagctctaattattgccaacattgtcactgtcgctcacgggcaaacaattatccatattaccttaggacataatcacacccttgtagggcccccaattacttcagaggttatttggaccaaacttggaagtgttgattattttgatataatttgcaacaaaactaaaccaatatttgtaatctgtaacagacaaaatctcacgttaattaatgttagcaaaatttataacggttactattatggttatgacagatccagtagtcaatataaaaattacttagttcgcataactcagcccaaattaacagtgcccactatgacaataattaaaatggctaataaagcattagaaaattttacatcaccaacaacgcccaatgaaaaaaacattccaaattcaatgattgcaattattgcggcggtggcattgggaatggcactaataataatatgcatgttcctatatgcttgttgctataaaaagtttcaacataaacagatccactactaaattttaacatttaattttttatacagatgttttccactacaatttttatcattactagccttgcagctgtaacttatggccgttcacacctaactgtacctgttggctcaacatgtacactacaaggaccccaacaaggctatgtcacttggtggagaatatatgataatggagggttcgctgaccatgtgatcagcctggtacaaaattttcatgcaacggaagagacttgaccataattaacataacatcaaatgacaaggcttctattatggaaccaactataaagatagtttagattacaacattattgtagtgccagccaccacttctgtccccgcaaaaccactttctctagcagcagtgccaaagcaagcacaattcctaaaacagcttctgctatgttaaagcttcaaaaaatcgctttaaataattccacagccgctcccaatacaattcctaaatcaacaattggcatcattactgccgtggtagtgggattaattattatatttttgtgcataatgtactatgcctgctgctatagaaaacatgaacaaaaaggtgatgcattactaaattttgacatttaattttttatagaattatgatattgtttcaatcaaataccactaacactatcaatgtgcagactactttaaatcatgacatggaaaaccacactacctcctatgcatacacaaacattcagcctaaatacgctatgcaatagaaattctaaaagacgtcccatctattctcctatgattagtcgtccccatatggctttgaatgaaatctaagatctttttttttttctcttacagtatggtgaacaccaatcatgatccctagaaatttcttcttcaccatactcatctgtgctttcaatgtctgtgctactttcacagcagtagccactgcaagcccagactgtataggaccatttgcttcctatgcactttttgccttcgttacttgcatctgcgtgtgtagcatagtctgcctggttattaattttttccaactggtagactggatctttgtacgaattgcctacctacgtcaccatcccgaataccgcaatcaaaatgttgcggcacttcttaggcttatttaaaaccatgcaggctatgctaccagtcattttaattctgctactaccctgcattgccctagcttccaccgccactcgcgctacacctgaacaacttagaaaatgcaaatttcaacaaccatggtcatttcttgattgctaccatgaaaaatctgatttccccacatactggatagtgattgttggaataattaacatactttcatgtacctttttctcaatcacaatataccccacatttaattttgggtggaattctcccaatgcactgggttacccacaagaaccagatgaacatatcccactacaacacatacaacaaccactagcactggtagagtatgaaaatgagccacaaccttcactacctcctgccattagttacttcaacctaaccggcggagatgactgaaatactcaccacctccaattccgccgaggatctgcttgatatggacggccgcgtctcagaacagcgactcgcccaactacgcatccgccagcagcaggaacgcgtgaccaaagagctcagagatgtcatccaaattcaccaatgcaaaaaaggcatattttgcttggtaaaacaagccaagatatcctacgagatcaccgctactgaccatcgcctctcttacgaacttggcccccaacgacaaaaatttacatgcatggtgggaatcacccctatagttatcactcagcaaagtggagatactaaggggtgcattcactgctcttgcgattccatcgagtgcacctacaccctgctaaagaccctatgcggcctaagagacctgctacccatgaattaaaaattaataaaaaatcacttacttgaaatcagcaataaggtctctgttgaaattttctcccagcagcacctcacttccctcttcccaactctggtattctaaaccccgttcagcggcatactttctccatactttaaaggggatgtcaaattttaactcctgtcctgtacccacaatcttcatgtctttcttcccagatgaccaagagagtccggctcagtgattccttcaaccctgtctacccctatgaagatgaaagcacctcccaacacccctttataaacccagggtttatttccccaaatggctttacacaaagcccagacggagttcttactttaaaatgtttaaccccactaacaaccacaggcgggtctctacagttaaaagtgggagggggtcttacaatagatgacaccgacggttttttgaaagaaaacataagtgccaccacaccactcgttaagactggtcactctataggtttgtcgctaggacccggattaggaacaaatgaaaacaaactttgtgccaaattgggagaaggacttacattcaattccaacaacatttgcattaatgacaatattaacaccctatggacaggagttaaccccaccagagccaactgtcaaataatggcctccagtgaatctaatgattgcaaattaattctaacactagttaaaactggagccctcgtcactgcatttgtttatgttataggagtatctaacgattttaatatgctaactacacataaaaatataaatttcactgcagagctgttttttgattctactggtaatttattaactagcctttcatccctaaaaactccacttaatcataaatcagggcaaaacatggctactggtgcccttactaatgctaaaggtttcatgcccagcacaactgcctatcctttcaatgttaattccagagaaaaagaaaactacatttacggaacttgttactacacagctagtgatcacactgcttttcccattgacacatctgtcatgcttaaccaaagagcattaaataatgagacatcatattgtattcgtgtaacttggtcctggaatacaggagttgccccagaagtgcaaacctctgctactaccctagtcacctctccatttaccttttactacattagagaagacgactgacaaataaagtttaacttgtttatttaaaatcaattcataaaattcgagtagttattttgcctcccccttcccatttaacagaatacaccaatctctccccacgcacagctttaaacatttggataccattacagatagacatagttttagattccacattccaaacagtttcaaagcgagccaatctggggtcagtgatacataaaaatgcatcgggatagtcttttaaagcgctttcacagtccaactgctgcggatgcgactccggagtctggatcacggtcatctggaagaagaacgatgggaatcataatccgaaaacggaatcgggcgattgtgtctcatcaaacccacaagcagccgctgtctgcgtcgctccgtgcgactgctgtttataggatcgggatccacagtgtcctgaagcatgattttaatagcccttaacattaactttctggtgcggtgcgcgcagcaacgcattctgatttcacttagattactacagtaggtacagcacattatcacaatattgtttaataaaccataattaaaagcgctccagccaaaactcatatcagatataatcgcccctgcatgaccatcataccaaattttaatataaattaaatgtcgttccctcaaaaacacactacccacatacataatctcttttggcatgtgcatattaacaatctgtctgtaccatggacaacgttggttaatcatgcaacccaatataaccttccgaaaccacactgccaacaccgctcccccagccatgcattgaagtgaaccctgccgattacaatgacaatgaagaacccaattctctcgaccatgaatcacttgagaataaaaaatatctatagtagcacaacaaagacataaatgcatgcatcttttcataatttttaactcctctggatttaaaaacatatcccaaggaatgggaaactcttgcagaacagtaaagctggcagaacaaggaagaccacgaacacaacttacactatgcatagtcatagtatcacaatctggcaacagcgggtggtcttcagtcatagaagctcgggtttcattttcctcacatcgtggtaactgggctctggtataagggtgatgtctggcgcatgatgtggagcgtgcgcgcaaccttgtcataatggagttgcttcctgacattctcgtattttgtatagcaaaacgcggccctggcacaacacactcttcttcgtcttctatcctgccgcttagtgtgttccgtctgataattcaagtacagccacactcttaagttggtcaaaagaatgctggcttcagttgtaattaaaactccatcatatttaattgttctaaggaaatcatccacggtagcatatgcaaatcccaaccaagcaatgcaactggattgcgtttcaagcagcagaggagagggaagagacggaagaatcatgttaatttttattccaaacgatctcgcagtacttcaaattgtagatcgcgcagatggcatctatcgcccccactgtgttggtgaaaaagcacagctaaatcaaaagaaatgcgattttcaaggtgctcaacggtggcttccaacaaagcctccacgcgcacatccaaaaacaaaagaataccaaaagaaggagcattttctaactcctcaaacatcatattacattcctgcaccattcccagataattttcagctttccagccttcaattattcgtgtcagttcttgtggtaaatccaaaccacacattacaaacaggtcccggagggcgccctccaccaccattcttaaacacaccctcataatgacaaaatatcttgctcctgtgtcacctgtagcaaattaagaatggcatcatcaattgacatgcccttggctctaagttcttctctaagttctagttgtagatactctctcatattatcaccaaactgcttagccagaagccccccgggaacaatagcaggggacgctacagtgcagtacaagcgcagacctccccaattggctccagcaaaaacaagattagaataagcatactggcaaccaccagtaatatcatcaaagttgctggaaatataatcaggcagagtttcttgtaagaattgaataaaagaaaaattttccaaaaaaacattcaaaacctctgggatgcaaatgcaataggttaccgcgctgcgctccaacattgttagttttgaattagtctgcaaaataaaagaaacaagcgtcatatcatagtagcctgtcgaacaggtggaaaaatcagtctttccatcacaagacaagccacagggtctccagctctaccctcgtaaaacctgtcatcgtgattaaacaacagcaccgaaagttcctcgcggtggccagcatgaataattcttgatgaagcatataatccagacatgttagcatcagttaaagagaaaaaacagccaacatagcctctgggtataattatgcttaatcttaagtatagcaaagccacccctcgcggatacaaagtaaaaggcacaggagaataaaaaatataattatttctctgctgctgttcaggcaacgtcgcccccggtccctctaaatacacatacaaagcctcattagccatggcttaccaggcaaagtacagccaacgcgcaaagcacaagctctaaagaagctctaaaacactctccaacctctccacaatatatacacaagccctaaactgacgtaatgagagtaaagtgtaaaaaatcccgccaaacccaacacacaccccgaaactgcgtcagcagggaaaagtacagtttcacttcctcaatcccaacaagcgtaacttcctctttctcacgatacgtcacatccgattaacttacaacgtcattttcccacggccgccccgcccattttagccgttcaccccacagccaatcaccacacagcgcgcacttttttaaattccctcatttacatattggcaccattccatctataaggtatattattgatgatg

SEQ ID NO: 265 - DNA, 34794 bp, Human adenovirus
  misc_feature 1..34794: note = Human adenovirus 11, NCBI Accession No. NC_011202
  source 1..34794: mol_type = genomic DNA
catcatcaataatataccttatagatggaatggtgccaatatgtaaatgaggtgattttaaaaagtgtggatcgtgtggtgattggctgtggggttaacggctaaaaggggcggtgcgaccgtgggaaaatgacgttttgtgggggtggagtttttttgcaagttgtcgcgggaaatgtgacgcataaaaaggcttttttctcacggaactacttagttttcccacggtatttaacaggaaatgaggtagttttgaccggatgcaagtgaaaattgttgattttcgcgcgaaaactgaatgaggaagtgtttttctgaataatgtggtatttatggcagggtggagtatttgttcagggccaggtagactttgacccattacgtggaggtttcgattaccgtgttttttacctgaatttccgcgtaccgtgtcaaagtcttctgtttttacgtaggtgtcagctgatcgctagggtatttatacctcagggtttgtgtcaagaggccactcttgagtgccagcgagaagagttttctcctctgcgccggcagtttaataataaaaaaatgagagatttgcgatttctgcctcaggaaataatctctgctgagactggaaatgaaatattggagcttgtggtgcacgccctgatgggagacgatccggagccacctgtgcagctttttgagcctcctacgcttcaggaactgtatgatttagaggtagagggatcggaggattctaatgaggaagctgtaaatggcttttttaccgattctatgcttttagctgctaatgaagggttagaattagatccgcctttggacacttttgatactccaggggtaattgtggaaagcggtacaggtgtaagaaaattacctgatttgagttccgtggactgtgatttgcactgctatgaagacgggtttcctccgagtgatgaggaggaccatgaaaaggagcagtccatgcagactgcagcgggtgagggagtgaaggctgccaatgttggttttcagttggattgcccggagcttcctggacatggctgtaagtcttgtgaatttcacaggaaaaatactggagtaaaggaactgttatgttcgctttgttatatgagaacgcactgccactttatttacagtaagtgtgtttaagttaaaatttaaaggaatatgctgtttttcacatgtatattgagtgtgagttttgtgcttcttattataggtcctgtgtctgatgctgatgaatcaccatctcctgattctactacctcacctcctgagattcaagcacctgttcctgtggacgtgcgcaagcccattcctgtgaagcttaagcctgggaaacgtccagcagtggaaaaacttgaggacttgttacagggtggggacggacctttggacttgagtacacggaaacgtccaagacaataagtgttccatatccgtgtttacttaaggtgacgtcaatatttgtgtgacagtgcaatgtaataaaaatatgttaactgttcactggtttttattgctttttgggcggggactcaggtatataagtagaagcagacctgtgtggttagctcataggagctggctttcatccatggaggtttgggccattttggaagaccttaggaagactaggcaactgttagagaacgcttcggacggagtctccggtttttggagattctggttcgctagtgaattagctagggtagtttttaggataaaacaggactataaccaagaatttgaaaagttgttggtagattgcccaggactttttgaagctcttaatttgggccatcaggttcactttaaagaaaaagttttatcagttttagacttttcaaccccaggtagaactgctgctgctgtggcttttcttacttttatattagataaatggatcccgcagactcatttcagcaggggatacgttttggatttcatagccacagcattgtggagaacatggaaggttcgcaagatgaggacaatcttaggttactggccagtgcagcctttgggtgtagcgggaatcctgaggcatccaccggtcatgccagcggttctggaggaggaacagcaagaggacaacccgagagccggcctggaccctccagtggaggaggcggagtagctgacttgtctcctgaactgcaacgggtgcttactggatctacgtccactggacgggataggggcgttaagagggagagggcatctagtggtactgatgctagatctgagttggctttaagtttaatgagtcgcagacgtcctgaaaccatttggtggcatgaggttcagaaagagggaagggatgaagtttctgtattgcaggagaaatattcactggaacaggtgaaaacatgttggttggagcctgaggatgattgggaggtggccattaaaaattatgccaagatagctttgaggcctgataaacagtataagattactagacggattaatatccggaatgcttgttacatatctggaaatggggctgaggtggtaatagatactcaagacaaggcagttattagatgctgcatgatggatatgtggcctggggtagtcggtatggaagcagtaacttttgtaaatgttaagtttaggggagatggttataatggaatagtgtttatggccaataccaaacttatattgcatggttgtagcttttttggtttcaacaatacctgtgtagatgcctggggacaggttagtgtacggggatgtagtttctatgcgtgttggattgccacagctggcagaaccaagagtcaattgtctctgaagaaatgcatatttcaaagatgtaacctgggcattctgaatgaaggcgaagcaagggtccgccactgcgcttctacagatactggatgttttattttgattaagggaaatgccagcgtaaagcataacatgatttgcggtgcttccgatgagaggccttatcaaatgctcacttgtgctggtgggcattgtaatatgctggctactgtgcatattgtttcccatcaacgcaaaaaatggcctgtttttgatcacaatgtgatgacgaagtgtaccatgcatgcaggtgggcgtagaggaatgtttatgccttaccagtgtaacatgaatcatgtgaaagtgttgttggaaccagatgccttttccagaatgagcctaacaggaatttttgacatgaacatgcaaatctggaagatcctgaggtatgatgatacgagatcgagggtacgcgcatgcgaatgcggaggcaagcatgccaggttccagccggtgtgtgtagatgtgactgaagatctcagaccggatcatttggttattgcccgcactggagcagagttcggatccagtggagaagaaactgactaaggtgagtattgggaaaactttggggtgggattttcagatggacagattgagtaaaaatttgttttttctgtcttgcagctgtcatgagtggaaacgcttcttttaaggggggagtcttcagcccttatctgacagggcgtctcccatcctgggcaggagttcgtcagaatgttatgggatctactgtggatggaagacccgtccaacccgccaattcttcaacgctgacctatgctactttaagttcttcacctttggacgcagctgcagctgccgccgccgcttctgttgccgctaacactgtgcttggaatgggttactatggaagcatcatggctaattccacttcctctaataacccttctaccctgactcaggacaagttacttgtccttttggcccagctggaggctttgacccaacgtctgggtgaactttctcagcaggtggtcgagttgcgagtacaaactgagtctgctgtcggcacggcaaagtctaaataaaaaaatcccagaatcaatgaataaataaacaagcttgttgttgatttaaaatcaagtgtttttatttcatttttcgcgcacggtatgccctagaccaccgatctctatcattgagaactcggtggattttttccaggatcctatagaggtgggattgaatgtttagatacatgggcattaggccgtctttggggtggagatagctccattgaagggattcatgctccggggtagtgttgtaaatcacccagtcataacaaggtcgcagtgcatggtgttgcacaatatcttttagaagtaggctgattgccacagataagcccttggtgtaggtgtttacaaaccggttgagctgggatgggtgcattcggggtgaaattatgtgcattttggattggatttttaagttggcaatattgccgccaagatcccgtcttgggttcatgttatgaaggaccaccaagacggtgtatccggtacatttaggaaatttatcgtgcagcttggatggaaaagcgtggaaaaatttggagacacccttgtgtcctccaagattttccatgcactcatccatgataatagcaatggggccgtgggcagcggcgcgggcaaacacgttccgtgggtctgacacatcatagttatgttcctgagttaaatcatcataagccattttaatgaatttggggcggagagtaccagattggggtatgaatgttccttcgggccccggagcatagttcccctcacagatttgcatttcccaagctttcagttccgagggtggaatcatgtccacctggggggctatgaaaaacaccgtttctggggcgggggtgattaattgtgatgatagcaaatttctgagcaattgagatttgccacatccggtggggccataaatgattccgattacgggttgcaggtggtagtttagggaacggcaactgccgtcttctcgaagcaagggggccacctcgttcatcatttcccttacatgcatattttcccgcaccaaatccattaggaggcgctctcctcctagtgatagaagttcttgtagtgaggaaaagtttttcagcggtttcagaccgtcagccatgggcattttggagagagtttgctgcaaaagttctagtctgttccacagttcagtgatgtgttctatggcatctcgatccagcagacctcctcgtttcgcgggtttggacggctcctggaatagggtatgagacgatgggcgtccagcgctgccagggttcggtccttccagggtctcagtgttcgagtcagggttgtttccgtcacagtgaaggggtgtgcgcctgcttgggcgcttgccagggtgcgcttcagactcatcctgctggtcgaaaacttctgtcgcttggcgccctgtatgtcggccaagtagcagtttaccatgagttcgtagttgagcgcctcggctgcgtggcctttggcgcggagcttacctttggaagttttcttgcataccgggcagtataggcatttcagcgcatacaacttgggcgcaaggaaaacggattctggggagtatgcatctgcgccgcaggaggcgcaaacagtttcacattccaccagccaggttaaatccggttcattggggtcaaaaacaagttttccgccatattttttgatgcgtttcttacctttggtctccatgagttcgtgtcctcgttgagtgacaaacaggctgtccgtgtccccgtagactgattttacaggcctcttctccagtggagtgcctcggtcttcttcgtacaggaactctgaccactctgatacaaaggcgcgcgtccaggccagcacaaaggaggctatgtgggaggggtagcgatcgttgtcaaccagggggtccaccttttccaaagtatgcaaacacatgtcaccctcttcaacatccaggaatgtgattggcttgtaggtgtatttcacgtgacctggggtccccgctgggggggtataaaagggggcggttctttgctcttcctcactgtcttccggatcgctgtccaggaacgtcagctgttggggtaggtattccctctcgaaggcgggcatgacctctgcactcaggttgtcagtttctaagaacgaggaggatttgatattgacagtgccggttgagatgcctttcatgaggttttcgtccatttggtcagaaaacacaatttttttattgtcaagtttggtggcaaatgatccatacagggcgttggataaaagtttggcaatggatcgcatggtttggttcttttccttgtccgcgcgctctttggcggcgatgttgagttggacatactcgcgtgccaggcacttccattcggggaagatagttgttaattcatctggcacgattctcacttgccaccctcgattatgcaaggtaattaaatccacactggtggccacctcgcctcgaaggggttcattggtccaacagagcctacctcctttcctagaacagaaagggggaagtgggtctagcataagttcatcgggagggtctgcatccatggtaaagattcccggaagtaaatccttatcaaaatagctgatgggagtggggtcatctaaggccatttgccattctcgagctgccagtgcgcgctcatatgggttaaggggactgccccatggcatgggatgggtgagtgcagaggcatacatgccacagatgtcatagacgtagatgggatcctcaaagatgcctatgtaggttggatagcatcgcccccctctgatacttgctcgcacatagtcatatagttcatgtgatggcgctagcagccccggacccaagttggtgcgattgggtttttctgttctgtagacgatctggcgaaagatggcgtgagaattggaagagatggtgggtctttgaaaaatgttgaaatgggcatgaggtagacctacagagtctctgacaaagtgggcataagattcttgaagcttggttaccagttcggcggtgacaagtacgtctagggcgcagtagtcaagtgtttcttgaatgatgtcataacctggttggtttttcttttcccacagttcgcggttgagaaggtattcttcgcgatccttccagtactcttctagcggaaacccgtctttgtctgcacggtaagatcctagcatgtagaactgattaactgccttgtaagggcagcagcccttctctacgggtagagagtatgcttgagcagcttttcgtagcgaagcgtgagtaagggcaaaggtgtctctgaccatgactttgagaaattggtatttgaagtcgatgtcgtcacaggctccctgttcccagagttggaagtctacccgtttcttgtaggcggggttgggcaaagcgaaagtaacatcattgaagagaatcttaccggctctgggcataaaattgcgagtgatgcgaaaaggctgtggtacttccgctcgattgttgatcacctgggcagctaggacgatctcgtcgaaaccgttgatgttgtgtcctacgatgtataattctatgaaacgcggcgtgcctctgacgtgaggtagcttactgagctcatcaaaggttaggtctgtggggtcagataaggcgtagtgttcgagagcccattcgtgcaggtgaggatttgcatgtaggaatgatgaccaaagatctaccgccagtgctgtttgtaactggtcccgatactgacgaaaatgccggccaattgccattttttctggagtgacacagtagaaggttctggggtcttgttgccatcgatcccacttgagtttaatggctagatcgtgggccatgttgacgagacgctcttctcctgagagtttcatgaccagcatgaaaggaactagttgtttgccaaaggatcccatccaggtgtaagtttccacatcgtaggtcaggaagagtctttctgtgcgaggatgagagccgatcgggaagaactggatttcctgccaccagttggaggattggctgttgatgtgatggaagtagaagtttctgcggcgcgccgagcattcgtgtttgtgcttgtacagacggccgcagtagtcgcagcgttgcacgggttgtatctcgtgaatgagttgtacctggcttcccttgacgagaaatttcagtgggaagccgaggcctggcgattgtatctcgtgctcttctatattcgctgtatcggcctgttcatcttctgtttcgatggtggtcatgctgacgagcccccgcgggaggcaagtccagacctcggcgcgggaggggcggagctgaaggacgagagcgcgcaggctggagctgtccagagtcctgagacgctgcggactcaggttagtaggtagggacagaagattaacttgcatgatcttttccagggcgtgcgggaggttcagatggtacttgatttccacaggttcgtttgtagagacgtcaatggcttgcagggttccgtgtcctttgggcgccactaccgtacctttgttttttcttttgatcggtggtggctctcttgcttcttgcatgctcagaagcggtgacggggacgcgcgccgggcggcagcggttgttccggacccgagggcatggctggtagtggcacgtcggcgccgcgcacgggcaggttctggtactgcgctctgagaagacttgcgtgcgccaccacgcgtcgattgacgtcttgtatctgacgtctctgggtgaaagctaccggccccgtgagcttgaacctgaaagagagttcaacagaatcaatttcggtatcgttaacggcagcttgtctcagtatttcttgtacgtcaccagagttgtcctggtaggcgatctccgccatgaactgctcgatttcttcctcctgaagatctccgcgacccgctctttcgacggtggccgcgaggtcattggagatacggcccatgagttgggagaatgcattcatgcccgcctcgttccagacgcggctgtaaaccacggccccctcggagtctcttgcgcgcatcaccacctgagcgaggttaagctccacgtgtctggtgaagaccgcatagttgcataggcgctgaaaaaggtagttgagtgtggtggcaatgtgttcggcgacgaagaaatacatgatccatcgtctcagcggcatttcgctaacatcgcccagagcttccaagcgctccatggcctcgtagaagtccacggcaaaattaaaaaactgggagtttcgcgcggacacggtcaattcctcctcgagaagacggatgagttcggctatggtggcccgtacttcgcgttcgaaggctcccgggatctcttcttcctcttctatctcttcttccactaacatctcttcttcgtcttcaggcgggggcggagggggcacgcggcgacgtcgacggcgcacgggcaaacggtcgatgaatcgttcaatgacctctccgcggcggcggcgcatggtttcagtgacggcgcggccgttctcgcgcggtcgcagagtaaaaacaccgccgcgcatctccttaaagtggtgactgggaggttctccgtttgggagggagagggcgctgattatacattttattaattggcccgtagggactgcacgcagagatctgatcgtgtcaagatccacgggatctgaaaacctttcgacgaaagcgtctaaccagtcacagtcacaaggtaggctgagtacggcttcttgtgggcgggggtggttatgtgttcggtctgggtcttctgtttcttcttcatctcgggaaggtgagacgatgctgctggtgatgaaattaaagtaggcagttctaagacggcggatggtggcgaggagcaccaggtctttgggtccggcttgctggatacgcaggcgattggccattccccaagcattatcctgacatctagcaagatctttgtagtagtcttgcatgagccgttctacgggcacttcttcctcacccgttctgccatgcatacgtgtgagtccaaatccgcgcattggttgtaccagtgccaagtcagctacgactctttcggcgaggatggcttgctgtacttgggtaagggtggcttgaaagtcatcaaaatccacaaagcggtggtaagctcctgtattaatggtgtaagcacagttggccatgactgaccagttaactgtctggtgaccagggcgcacgagctcggtgtatttaaggcgcgaataggcgcgggtgtcaaagatgtaatcgttgcaggtgcgcaccagatactggtaccctataagaaaatgcggcggtggttggcggtagagaggccatcgttctgtagctggagcgccaggggcgaggtcttccaacataaggcggtgatagccgtagatgtacctggacatccaggtgattcctgcggcggtagtagaagcccgaggaaactcgcgtacgcggttccaaatgttgcgtagcggcatgaagtagttcattgtaggcacggtttgaccagtgaggcgcgcgcagtcattgatgctctatagacacggagaaaatgaaagcgttcagcgactcgactccgtagcctggaggaacgtgaacgggttgggtcgcggtgtaccccggttcgagacttgtactcgagccggccggagccgcggctaacgtggtattggcactcccgtctcgacccagcctacaaaaatccaggatacggaatcgagtcgttttgctggtttccgaatggcagggaagtgagtcctattttttttttttgccgctcagatgcatcccgtgctgcgacagatgcgcccccaacaacagcccccctcgcagcagcagcagcagcaatcacaaaaggctgtccctgcaactactgcaactgccgccgtgagcggtgcgggacagcccgcctatgatctggacttggaagagggcgaaggactggcacgtctaggtgcgccttcacccgagcggcatccgcgagttcaactgaaaaaagattctcgcgaggcgtatgtgccccaacagaacctatttagagacagaagcggcgaggagccggaggagatgcgagcttcccgctttaacgcgggtcgtgagctgcgtcacggtttggaccgaagacgagtgttgcgggacgaggatttcgaagttgatgaaatgacagggatcagtcctgccagggcacacgtggctgcagccaaccttgtatcggcttacgagcagacagtaaaggaagagcgtaacttccaaaagtcttttaataatcatgtgcgaaccctgattgcccgcgaagaagttacccttggtttgatgcatttgtgggatttgatggaagctatcattcagaaccctactagcaaacctctgaccgcccagctgtttctggtggtgcaacacagcagagacaatgaggctttcagagaggcgctgctgaacatcaccgaacccgaggggagatggttgtatgatcttatcaacattctacagagtatcatagtgcaggagcggagcctgggcctggccgagaaggtggctgccatcaattactcggttttgagcttgggaaaatattacgctcgcaaaatctacaagactccatacgttcccatagacaaggaggtgaagatagatgggttctacatgcgcatgacgctcaaggtcttgaccctgagcgatgatcttggggtgtatcgcaatgacagaatgcatcgcgcggttagcgccagcaggaggcgcgagttaagcgacagggaactgatgcacagtttgcaaagagctctgactggagctggaaccgagggtgagaattacttcgacatgggagctgacttgcagtggcagcctagtcgcagggctctgagcgccgcgacggcaggatgtgagcttccttacatagaagaggcggatgaaggcgaggaggaagagggcgagtacttggaagactgatggcacaacccgtgttttttgctagatggaacagcaagcaccggatcccgcaatgcgggcggcgctgcagagccagccgtccggcattaactcctcggacgattggacccaggccatgcaacgtatcatggcgttgacgactcgcaaccccgaagcctttagacagcaaccccaggccaaccgtctatcggccatcatggaagctgtagtgccttcccgctctaatcccactcatgagaaggtcctggccatcgtgaacgcgttggtggagaacaaagctattcgtccagatgaggccggactggtatacaacgctctcttagaacgcgtggctcgctacaacagtagcaatgtgcaaaccaatttggaccgtatgataacagatgtacgcgaagccgtgtctcagcgcgaaaggttccagcgtgatgccaacctgggttcgctggtggcgttaaatgctttcttgagtactcagcctgctaatgtgccgcgtggtcaacaggattatactaactttttaagcgctttgagactgatggtatcagaagtacctcagagcgaagtgtatcagtccggtcctgattacttctttcagactagcagacagggcttgcagacggtaaatctgagccaagcttttaaaaaccttaaaggtttgtggggagtgcatgccccggtaggagaaagagcaaccgtgtctagcttgttaactccgaactcccgcctattattactgttggtagctcctttcaccgacagcggtagcatcgaccgtaattcctatttgggttacctactaaacctgtatcgcgaagccatagggcaaagtcaggtggacgagcagacctatcaagaaattacccaagtcagtcgcgctttgggacaggaagacactggcagtttggaagccactctgaacttcttgcttaccaatcggtctcaaaagatccctcctcaatatgctcttactgcggaggaggagaggatccttagatatgtgcagcagagcgtgggattgtttctgatgcaagagggggcaactccgactgcagcactggacatgacagcgcgaaatatggagcccagcatgtatgccagtaaccgacctttcattaacaaactgctggactacttgcacagagctgccgctatgaactctgattatttcaccaatgccatcttaaacccgcactggctgcccccacctggtttctacacgggcgaatatgacatgcccgaccctaatgacggatttctgtgggacgacgtggacagcgatgttttttcacctctttctgatcatcgcacgtggaaaaaggaaggcggcgatagaatgcattcttctgcatcgctgtccggggtcatgggtgctaccgcggctgagcccgagtctgcaagtccttttcctagtctacccttttctctacacagtgtacgtagcagcgaagtgggtagaataagtcgcccgagtttaatgggcgaagaggagtatctaaacgattccttgctcagaccggcaagagaaaaaaatttcccaaacaatggaatagaaagtttggtggataaaatgagtagatggaagacttatgctcaggatcacagagacgagcctgggatcatggggattacaagtagagcgagccgtagacgccagcgccatgacagacagaggggtcttgtgtgggacgatgaggattcggccgatgatagcagcgtgctggacttgggtgggagaggaaggggcaacccgtttgctcatttgcgccctcgcttgggtggtatgttgtaaaaaaaaataaaaaaaaaactcaccaaggccatggcgacgagcgtacgttcgttcttctttattatctgtgtctagtataatgaggcgagtcgtgctaggcggagcggtggtgtatccggagggtcctcctccttcgtacgagagcgtgatgcagcagcagcaggcgacggcggtgatgcaatccccactggaggctccctttgtgcctccgcgatacctggcacctacggagggcagaaacagcattcgttattcggaactggcacctcagtacgataccaccaggttgtatctggtggacaacaagtcggcggacattgcttctctgaactatcagaatgaccacagcaacttcttgaccacggtggtgcaaaacaatgactttacccctacggaagccagcacccagaccattaactttgatgaacgatcgcggtggggcggtcagctaaagaccatcatgcatactaacatgccaaacgtgaacgagtatatgtttagtaacaagttcaaagcgcgtgtgatggtgtccagaaaacctcccgacggtgctgcagttggggatacttatgatcacaagcaggatattttgaaatatgagtggttcgagtttactttgccagaaggcaacttttcagttactatgactattgatttgatgaacaatgccatcatagataattacttgaaagtgggtagacagaatggagtgcttgaaagtgacattggtgttaagttcgacaccaggaacttcaagctgggatgggatcccgaaaccaagttgatcatgcctggagtgtatacgtatgaagccttccatcctgacattgtcttactgcctggctgcggagtggattttaccgagagtcgtttgagcaaccttcttggtatcagaaaaaaacagccatttcaagagggttttaagattttgtatgaagatttagaaggtggtaatattccggccctcttggatgtagatgcctatgagaacagtaagaaagaacaaaaagccaaaatagaagctgctacagctgctgcagaagctaaggcaaacatagttgccagcgactctacaagggttgctaacgctggagaggtcagaggagacaattttgcgccaacacctgttccgactgcagaatcattattggccgatgtgtctgaaggaacggacgtgaaactcactattcaacctgtagaaaaagatagtaagaatagaagctataatgtgttggaagacaaaatcaacacagcctatcgcagttggtatctttcgtacaattatggcgatcccgaaaaaggagtgcgttcctggacattgctcaccacctcagatgtcacctgcggagcagagcaggtctactggtcgcttccagacatgatgaaggatcctgtcactttccgctccactagacaagtcagtaactaccctgtggtgggtgcagagcttatgcccgtcttctcaaagagcttctacaacgaacaagctgtgtactcccagcagctccgccagtccacctcgcttacgcacgtcttcaaccgctttcctgagaaccagattttaatccgtccgccggcgcccaccattaccaccgtcagtgaaaacgttcctgctctcacagatcacgggaccctgccgttgcgcagcagtatccggggagtccaacgtgtgaccgttactgacgccagacgccgcacctgtccctacgtgtacaaggcactgggcatagtcgcaccgcgcgtcctttcaagccgcactttctaaaaaaaaaaaaaatgtccattcttatctcgcccagtaataacaccggttggggtctgcgcgctccaagcaagatgtacggaggcgcacgcaaacgttctacccaacatcctgtccgtgttcgcggacattttcgcgctccatggggcgccctcaagggccgcactcgcgttcgaaccaccgtcgatgatgtaatcgatcaggtggttgccgacgcccgtaattatactcctactgcgcctacatctactgtggatgcagttattgacagtgtagtggctgacgctcgcaactatgctcgacgtaagagccggcgaaggcgcattgccagacgccaccgagctaccactgccatgcgagccgcaagagctctgctacgaagagctagacgcgtggggcgaagagccatgcttagggcggccagacgtgcagcttcgggcgccagcgccggcaggtcccgcaggcaagcagccgctgtcgcagcggcgactattgccgacatggcccaatcgcgaagaggcaatgtatactgggtgcgtgacgctgccaccggtcaacgtgtacccgtgcgcacccgtccccctcgcacttagaagatactgagcagtctccgatgttgtgtcccagcggcgaggatgtccaagcgcaaatacaaggaagaaatgctgcaggttatcgcacctgaagtctacggccaaccgttgaaggatgaaaaaaaaccccgcaaaatcaagcgggttaaaaaggacaaaaaagaagaggaagatggcgatgatgggctggcggagtttgtgcgcgagtttgccccacggcgacgcgtgcaatggcgtgggcgcaaagttcgacatgtgttgagacctggaacttcggtggtctttacacccggcgagcgttcaagcgctacttttaagcgttcctatgatgaggtgtacggggatgatgatattcttgagcaggcggctgaccgattaggcgagtttgcttatggcaagcgtagtagaataacttccaaggatgagacagtgtcgatacccttggatcatggaaatcccacccctagtcttaaaccggtcactttgcagcaagtgttacccgtaactccgcgaacaggtgttaaacgcgaaggtgaagatttgtatcccactatgcaactgatggtacccaaacgccagaagttggaggacgttttggagaaagtaaaagtggatccagatattcaacctgaggttaaagtgagacccattaagcaggtagcgcctggtctgggggtacaaactgtagacattaagattcccactgaaagtatggaagtgcaaactgaacccgcaaagcctactgccacctccactgaagtgcaaacggatccatggatgcccatgcctattacaactgacgccgccggtcccactcgaagatcccgacgaaagtacggtccagcaagtctgttgatgcccaattatgttgtacacccatctattattcctactcctggttaccgaggcactcgctactatcgcagccgaaacagtacctcccgccgtcgccgcaagacacctgcaaatcgcagtcgtcgccgtagacgcacaagcaaaccgactcccggcgccctggtgcggcaagtgtaccgcaatggtagtgcggaacctttgacactgccgcgtgcgcgttaccatccgagtatcatcacttaatcaatgttgccgctgcctccttgcagatatggccctcacttgtcgccttcgcgttcccatcactggttaccgaggaagaaactcgcgccgtagaagagggatgttgggacgcggaatgcgacgctacaggcgacggcgtgctatccgcaagcaattgcggggtggttttttaccagccttaattccaattatcgctgctgcaattggcgcgataccaggcatagcttccgtggcggttcaggcctcgcaacgacattgacattggaaaaaaacgtataaataaaaaaaaaaaaatacaatggactctgacactcctggtcctgtgactatgttttcttagagatggaagacatcaatttttcatccttggctccgcgacacggcacgaagccgtacatgggcacctggagcgacatcggcacgagccaactgaacgggggcgccttcaattggagcagtatctggagcgggcttaaaaattttggctcaaccataaaaacatacgggaacaaagcttggaacagcagtacaggacaggcgcttagaaataaacttaaagaccagaacttccaacaaaaagtagtcgatgggatagcttccggcatcaatggagtggtagatttggctaaccaggctgtgcagaaaaagataaacagtcgtttggacccgccgccagcaaccccaggtgaaatgcaagtggaggaagaaattcctccgccagaaaaacgaggcgacaagcgtccgcgtcccgatttggaagagacgctggtgacgcgcgtagatgaaccgccttcttatgaggaagcaacgaagcttggaatgcccaccactagaccgatagccccaatggccaccggggtgatgaaaccttctcagttgcatcgacccgtcaccttggatttgccccctccccctgctgctactgctgtacccgcttctaagcctgtcgctgccccgaaaccagtcgccgtagccaggtcacgtcccgggggcgctcctcgtccaaatgcgcactggcaaaatactctgaacagcatcgtgggtctaggcgtgcaaagtgtaaaacgccgtcgctgcttttaattaaatatggagtagcgcttaacttgcctatctgtgtatatgtgtcattacacgccgtcacagcagcagaggaaaaaaggaagaggtcgtgcgtcgacgctgagttactttcaagatggccaccccatcgatgctgccccaatgggcatacatgcacatcgccggacaggatgcttcggagtacctgagtccgggtctggtgcagttcgcccgcgccacagacacctacttcaatctgggaaataagtttagaaatcccaccgtagcgccgacccacgatgtgaccaccgaccgtagccagcggctcatgttgcgcttcgtgcccgttgaccgggaggacaatacatactcttacaaagtgcggtacaccctggccgtgggcgacaacagagtgctggatatggccagcacgttctttgacattaggggtgtgttggacagaggtcccagtttcaaaccctattctggtacggcttacaactccctggctcctaaaggcgctccaaatacatctcagtggattgcagaaggtgtaaaaaatacaactggtgaggaacacgtaacagaagaggaaaccaatactactacttacacttttggcaatgctcctgtaaaagctgaagctgaaattacaaaagaaggactcccagtaggtttggaagtttcagatgaagaaagtaaaccgatttatgctgataaaacatatcagccagaacctcagctgggagatgaaacttggactgaccttgatggaaaaaccgaaaagtatggaggcagggctctcaaacccgatactaagatgaaaccatgctacgggtcctttgccaaacctactaatgtgaaaggcggtcaggcaaaacaaaaaacaacggagcagccaaatcagaaagtcgaatatgatatcgacatggagttttttgatgcggcatcgcagaaaacaaacttaagtcctaaaattgtcatgtatgcagaaaatgtaaatttggaaactccagacactcatgtagtgtacaaacctggaacagaagacacaagttccgaagctaatttgggacaacaatctatgcccaacagacccaactacattggcttcagagataactttattggacttatgtactataacagtactggtaacatgggggtgctggctggtcaagcgtctcagttaaatgcagtggttgacttgcaggacagaaacacagaactttcttaccaactcttgcttgactctctgggcgacagaaccagatactttagcatgtggaatcaggctgtggacagttatgatcctgatgtacgtgttattgaaaatcatggtgtggaagatgaacttcccaactactgttttccactggacggcataggtgttccaacaaccagttacaaatcaatagttccaaatggagacaatgcgcctaattggaaggaacctgaagtaaatggaacaagtgagatcggacagggtaatttgtttgccatggaaattaaccttcaagccaatctatggcgaagtttcctttattccaatgtggctctatatctcccagactcgtacaaatacaccccgtccaatgtcactcttccagaaaacaaaaacacctacgactacatgaacgggcgggtggtgccgccatctctagtagacacctatgtgaacattggtgccaggtggtctctggatgccatggacaatgtcaacccattcaaccaccaccgtaacgctggcttgcgttaccgatccatgcttctgggtaacggacgttatgtgcctttccacatacaagtgcctcaaaaattcttcgctgttaaaaacctgctgcttctcccaggctcctacacttatgagtggaactttaggaaggatgtgaacatggttctacagagttccctcggtaacgacctgcgggtagatggcgccagcatcagtttcacgagcatcaacctctatgctacttttttccccatggctcacaacaccgcttccacccttgaagccatgctgcggaatgacaccaatgatcagtcattcaacgactacctatctgcagctaacatgctctaccccattcctgccaatgcaaccaatattcccatttccattccttctcgcaactgggcggctttcagaggctggtcatttaccagactgaaaaccaaagaaactccctctttggggtctggatttgacccctactttgtctattctggttctattccctacctggatggtaccttctacctgaaccacacttttaagaaggtttccatcatgtttgactcttcagtgagctggcctggaaatgacaggttactatctcctaacgaatttgaaataaagcgcactgtggatggcgaaggctacaacgtagcccaatgcaacatgaccaaagactggttcttggtacagatgctcgccaactacaacatcggctatcagggcttctacattccagaaggatacaaagatcgcatgtattcatttttcagaaacttccagcccatgagcaggcaggtggttgatgaggtcaattacaaagacttcaaggccgtcgccataccctaccaacacaacaactctggctttgtgggttacatggctccgaccatgcgccaaggtcaaccctatcccgctaactatccctatccactcattggaacaactgccgtaaatagtgttacgcagaaaaagttcttgtgtgacagaaccatgtggcgcataccgttctcgagcaacttcatgtctatgggggcccttacagacttgggacagaatatgctctatgccaactcagctcatgctctggacatgacctttgaggtggatcccatggatgagcccaccctgctttatcttctcttcgaagttttcgacgtggtcagagtgcatcagccacaccgcggcatcatcgaggcagtctacctgcgtacaccgttctcggccggtaacgctaccacgtaagaagcttcttgcttcttgcaaatagcagctgcaaccatggcctgcggatcccaaaacggctccagcgagcaagagctcagagccattgtccaagacctgggttgcggaccctattttttgggaacctacgataagcgcttcccggggttcatggcccccgataagctcgcctgtgccattgtaaatacggccggacgtgagacggggggagagcactggttggctttcggttggaacccacgttctaacacctgctacctttttgatccttttggattctcggatgatcgtctcaaacagatttaccagtttgaatatgagggtctcctgcgccgcagcgctcttgctaccaaggaccgctgtattacgctggaaaaatctacccagaccgtgcagggtccccgttctgccgcctgcggacttttctgctgcatgttccttcacgcctttgtgcactggcctgaccgtcccatggacggaaaccccaccatgaaattgctaactggagtgccaaacaacatgcttcattctcctaaagtccagcccaccctgtgtgacaatcaaaaagcactctaccattttcttaatacccattcgccttattttcgctcccatcgtacacacatcgaaagggccactgcgttcgaccgtatggatgttcaataatgactcatgtaaacaacgtgttcaataaacatcactttatttttttacatgtatcaaggctctgcattacttatttatttacaagtcgaatgggttctgacgagaatcagaatgacccgcaggcagtgatacgttgcggaactgatacttgggttgccacttgaattcgggaatcaccaacttgggaaccggtatatcgggcaggatgtcactccacagctttctggtcagctgcaaagctccaagcaggtcaggagccgaaatcttgaaatcacaattaggaccagtgctttgagcgcgagagttgcggtacaccggattgcagcactgaaacaccatcagcgacggatgtctcacgcttgccagcacggtgggatctgcaatcatgcccacatccagatcttcagcattggcaatgctgaacggggtcatcttgcaggtctgcctacccatggcgggcacccaattaggcttgtggttgcaatcgcagtgcagggggatcagtatcatcttggcctgatcctgtctgattcctggatacacggctctcatgaaagcatcatattgcttgaaagcctgctgggctttactaccctcggtataaaacatcccgcaggacctgctcgaaaactggttagctgcacagccggcatcattcacacagcagcgggcgtcattgttagctatttgcaccacacttctgccccagcggttttgggtgattttggttcgctcgggattctcctttaaggctcgttgtccgttctcgctggccacatccatctcgataatctgctccttctgaatcataatattgccatgcaggcacttcagcttgccctcataatcattgcagccatgaggccacaacgcacagcctgtacattcccaattatggtgggcgatctgagaaaaagaatgtatcattccctgcagaaatcttcccatcatcgtgctcagtgtcttgtgactagtgaaagttaactggatgcctcggtgctcctcgtttacgtactggtgacagatgcgcttgtattgttcgtgttgctcaggcattagtttaaaagaggttctaagttcgttatccagcctgtacttctccatcagcagacacatcacttccatgcctttctcccaagcagacaccaggggcaagctaatcggattcttaacagtgcaggcagcagctcctttagccagagggtcatctttagcgatcttctcaatgcttcttttgccatccttctcaacgatgcgcacgggcgggtagctgaaacccactgctacaagttgcgcctcttctctttcttcttcgctgtcttgactgatgtcttgcatggggatatgtttggtcttccttggcttctttttggggggtatcggaggaggaggactgtcgctccgttccggagacagggaggattgtgacgtttcgctcaccattaccaactgactgtcggtagaagaacctgaccccacacggcgacaggtgtttctcttcgggggcagaggtggaggcgattgcgaagggctgcggtccgacctggaaggcggatgactggcagaaccccttccgcgttcgggggtgtgctccctgtggcggtcgcttaactgatttccttcgcggctggccattgtgttctcctaggcagagaaacaacagacatggaaactcagccattgctgtcaacatcgccacgagtgccatcacatctcgtcctcagcgacgaggaaaaggagcagagcttaagcattccaccgcccagtcctgccaccacctctaccctagaagataaggaggtcgacgcatctcatgacatgcagaataaaaaagcgaaagagtctgagacagacatcgagcaagacccgggctatgtgacaccggtggaacacgaggaagagttgaaacgctttctagagagagaggatgaaaactgcccaaaacaacgagcagataactatcaccaagatgctggaaatagggatcagaacaccgactacctcatagggcttgacggggaagacgcgctccttaaacatctagcaagacagtcgctcatagtcaaggatgcattattggacagaactgaagtgcccatcagtgtggaagagctcagccgcgcctacgagcttaacctcttttcacctcgtactccccccaaacgtcagccaaacggcacctgcgagccaaatcctcgcttaaacttttatccagcttttgctgtgccagaagtactggctacctatcacatcttttttaaaaatcaaaaaattccagtctcctgccgcgctaatcgcacccgcgccgatgccctactcaatctgggacctggttcacgcttacctgatatagcttccttggaagaggttccaaagatcttcgagggtctgggcaataatgagactcgggccgcaaatgctctgcaaaagggagaaaatggcatggatgagcatcacagcgttctggtggaattggaaggcgataatgccagactcgcagtactcaagcgaagcatcgaggtcacacacttcgcatatcccgctgtcaacctgccccctaaagtcatgacggcggtcatggaccagttactcattaagcgcgcaagtcccctttcagaagacatgcatgacccagatgcctgtgatgagggtaaaccagtggtcagtgatgagcagctaacccgatggctgggcaccgactctcccagggatttggaagagcgtcgcaagcttatgatggccgtggtgctggttaccgtagaactagagtgtctccgacgtttctttaccgattcagaaaccttgcgcaaactcgaagagaatctgcactacacttttagacacggctttgtgcggcaggcatgcaagatatctaacgtggaactcaccaacctggtttcctacatgggtattctgcatgagaatcgcctaggacaaagcgtgctgcacagcaccctgaagggggaagcccgccgtgattacatccgcgattgtgtctatctgtacctgtgccacacgtggcaaaccggcatgggtgtatggcagcaatgtttagaagaacagaacttgaaagagcttgacaagctcttacagaaatctcttaaggttctgtggacagggttcgacgagcgcaccgtcgcttccgacctggcagacctcatcttcccagagcgtctcagggttactttgcgaaacggattgcctgactttatgagccagagcatgcttaacaattttcgctctttcatcctggaacgctccggtatcctgcccgccacctgctgcgcactgccctccgactttgtgcctctcacctaccgcgagtgccccccgccgctatggagtcactgctacctgttccgtctggccaactatctctcctaccactcggatgtgatcgaggatgtgagcggagacggcttgctggagtgtcactgccgctgcaatctgtgcacgccccaccggtccctagcttgcaacccccagttgatgagcgaaacccagataataggcacctttgaattgcaaggccccagcagccaaggcgatgggtcttctcctgggcaaagtttaaaactgaccccgggactgtggacctccgcctacttgcgcaagtttgctccggaagattaccacccctatgaaatcaagttctatgaggaccaatcacagcctccaaaggccgaactttcggcctgcgtcatcacccagggggcaattctggcccaattgcaagccatccaaaaatcccgccaagaatttctactgaaaaagggtaagggggtctaccttgacccccagaccggcgaggaactcaacacaaggttccctcaggatgtcccaacgacgagaaaacaagaagttgaaggtgcagccgccgcccccagaagatatggaggaagattgggacagtcaggcagaggaggcggaggaggacagtctggaggacagtctggaggaagacagtttggaggaggaaaacgaggaggcagaggaggtggaagaagtaaccgccgacaaacagttatcctcggctgcggagacaagcaacagcgctaccatctccgctccgagtcgaggaacccggcggcgtcccagcagtagatgggacgagaccggacgcttcccgaacccaaccagcgcttccaagaccggtaagaaggatcggcagggatacaagtcctggcgggggcataagaatgccatcatctcctgcttgcatgagtgcgggggcaacatatccttcacgcggcgctacttgctattccaccatggggtgaactttccgcgcaatgttttgcattactaccgtcacctccacagcccctactatagccagcaaatcccggcagtctcgacagataaagacagcggcggcgacctccaacagaaaaccagcagcggcagttagaaaatacacaacaagtgcagcaacaggaggattaaagattacagccaacgagccagcgcaaacccgagagttaagaaatcggatctttccaaccctgtatgccatcttccagcagagtcggggtcaagagcaggaactgaaaataaaaaaccgatctctgcgttcgctcaccagaagttgtttgtatcacaagagcgaagatcaacttcagcgcactctcgaggacgccgaggctctcttcaacaagtactgcgcgctgactcttaaagagtaggcagcgaccgcgcttattcaaaaaaggcgggaattacatcatcctcgacatgagtaaagaaattcccacgccttacatgtggagttatcaaccccaaatgggattggcggcaggcgcctcccaggactactccacccgcatgaattggctcagcgccgggccttctatgatttctcgagttaatgatatacgcgcctaccgaaaccaaatacttttggaacagtcagctcttaccaccacgccccgccaacaccttaatcccagaaattggcccgccgccctagtgtaccaggaaagtcccgctcccaccactgtattacttcctcgagacgcccaggccgaagtccaaatgactaatgcaggtgcgcagttagctggcggctccaccctatgtcgtcacaggcctcggcataatataaaacgcctgatgatcagaggccgaggtatccagctcaacgacgagtcggtgagctctccgcttggtctacgaccagacggaatctttcagattgccggctgcgggagatcttccttcacccctcgtcaggctgttctgactttggaaagttcgtcttcgcaaccccgctcgggcggaatcgggaccgttcaatttgtggaggagtttactccctctgtctacttcaaccccttctccggatctcctgggcattacccggacgagttcataccgaacttcgacgcgattagcgagtcagtggacggctacgattgatgtctggtgacgcggctgagctatctcggctgcgacatctagaccactgccgccgctttcgctgctttgcccgggaactcattgagttcatctacttcgaactccccaaggatcaccctcaaggtccggcccacggagtgcggatttctatcgaaggcaaaatagactctcgcctgcaacgaattttctcccagcggcccgtgctgatcgagcgagaccagggaaacaccacggtttccatctactgcatttgtaatcaccccggattgcatgaaagcctttgctgtcttatgtgtactgagtttaataaaaactgaattaagactctcctacggactgccgcttcttcaacccggattttacaaccagaagaacgaaacttttcctgtcgtccaggactctgttaacttcacctttcctactcacaaactagaagctcaacgactacaccgcttttccagaagcattttccctactaatactactttcaaaaccggaggtgagctccaaggtcttcctacagaaaacccttgggtggaagcgggccttgtagtgctaggaattcttgcgggtgggcttgtgattattctttgctacctatacacaccttgcttcactttcttagtggtgttgtggtattggtttaaaaaatggggcccatactagtcttgcttgttttactttcgcttttggaaccgggttctgccaattacgatccatgtctagacttcgacccagaaaactgcacacttacttttgcacccgacacaagccgcatctgtggagttcttattaagtgcggatgggaatgcaggtccgttgaaattacacacaataacaaaacctggaacaataccttatccaccacatgggagccaggagttcccgagtggtacactgtctctgtccgaggtcctgacggttccatccgcattagtaacaacactttcattttttctgaaatgtgcgatctggccatgttcatgagcaaacagtattctctatggcctcctagcaaggacaacatcgtaacgttctccattgcttattgcttgtgcgcttgccttcttactgctttactgtgcgtatgcatacacctgcttgtaaccactcgcatcaaaaacgccaataacaaagaaaaaatgccttaacctctttctgtttacagacatggcttctcttacatctctcatatttgtcagcattgtcactgccgctcatggacaaacagtcgtctctatccctctaggacataattacactctcataggacccccaatcacttcagaggtcatctggaccaaactgggaagcgttgattactttgatataatctgcaacaaaacaaaaccaataatagtaacttgcaacatacaaaatcttacattgattaatgttagcaaagtttacagcggttactattatggttatgacagatacagtagtcaatatagaaattacttggttcgtgttacccagttgaaaaccacgaaaatgccaaatatggcaaagattcgatccgatgacaattctctagaaacttttacatctcccaccacacccgacgaaaaaaacatcccagattcaatgattgcaattgttgcagcggtggcagtggtgatggcactaataataatatgcatgcttttatatgcttgtcgctacaaaaagtttcatcctaaaaaacaagatctcctactaaggcttaacatttaatttctttttatacagccatggtttccactaccacattccttatgcttactagtctcgcaactctgacttctgctcgctcacacctcactgtaactataggctcaaactgcacactaaaaggacctcaaggtggtcatgtcttttggtggagaatatatgacaatggatggtttacaaaaccatgtgaccaacctggtagatttttctgcaacggcagagacctaaccattatcaacgtgacagcaaatgacaaaggcttctattatggaaccgactataaaagtagtttagattataacattattgtactgccatctaccactccagcaccccgcacaactactttctctagcagcagtgtcgctaacaatacaatttccaatccaacctttgccgcgcttttaaaacgcactgtgaataattctacaacttcacatacaacaatttccacttcaacaatcagcattatcgctgcagtgacaattggaatatctattcttgtttttaccataacctactacgcctgctgctatagaaaagacaaacataaaggtgatccattacttagatttgatatttaatttgttctttttttttttatttacagtatggtgaacaccaatcatggtacctagaaatttcttcttcaccatactcatttgtgcatttaatgtttgcgctactttcacagcagtagccacagcaaccccagactgtataggagcatttgcttcctatgcactttttgcttttgttacttgcatctgcgtatgtagcatagtctgcctggttattaattttttccaacttatagactggatccttgtgcgaattgcctacctgcgccaccatcccgaataccgcaaccaaaatatcgcggcacttcttagactcatctaaaaccatgcaggctatactaccaatatttttgcttctattgcttccctacgctgtctcaaccccagctgcctatagtactccaccagaacaccttagaaaatgcaaattccaacaaccgtggtcatttcttgcttgctatcgagaaaaatcagaaattcccccaaatttaataatgattgctggaataattaatataatctgttgcaccataatttcatttttgatataccccctatttgattttggctggaatgctcccaatgcacatgatcatccacaagacccagaggaacacattcccctacaaaacatgcaacatccaatagcgctaatagattacgaaagtgaaccacaacccccactactccctgctattagttacttcaacctaaccggcggagatgactgaaacactcaccacctccaattccgccgaggatctgctcgatatggacggccgcgtctcagaacagcgactcgcccaactacgcatccgccagcagcaggaacgcgcggccaaagagctcagagatgtcatccaaattcaccaatgcaaaaaaggcatattctgtttggtaaaacaagccaagatatcctacgagatcaccgctactgaccatcgcctctcttacgaacttggcccccaacgacaaaaatttacctgcatggtgggaatcaaccccatagttatcacccagcaaagtggagatactaagggttgcattcactgctcctgcgattccatcgagtgcacctacaccctgctgaagaccctatacggcctaagagacctgctaccaatgaattaaaaaatgattaataaaaaatcacttacttgaaatcagcaataaggtctctgttgaaattttctcccagcagcacctcacttccctcttcccaactctggtattctaaaccccgttcagcggcatactttctccatactttaaaggggatgtcaaattttagctcctctcctgtacccacaatcttcatgtctttcttcccagatgaccaagagagtccggctcagtgactccttcaaccctgtctacccctatgaagatgaaagcacctcccaacacccctttataaacccagggtttatttccccaaatggcttcacacaaagcccaaacggagttcttactttaaaatgtttaaccccactaacaaccacaggcggatctctacagctaaaagtgggagggggacttacagtggatgacaccaacggttttttgaaagaaaacataagtgccaccacaccactcgttaagactggtcactctataggtttaccactaggagccggattgggaacgaatgaaaataaactttgtatcaaattaggacaaggacttacattcaattcaaacaacatttgcattgatgacaatattaacaccttatggacaggagtcaaccccaccgaagccaactgtcaaatcatgaactccagtgaatctaatgattgcaaattaattctaacactagttaaaactggagcactagtcactgcatttgtttatgttataggagtatctaacaattttaatatgctaactacacacagaaatataaattttactgcagagctgtttttcgattctactggtaatttactaactagactctcatccctcaaaactccacttaatcataaatcaggacaaaacatggctactggtgccattactaatgctaaaggtttcatgcccagcacgactgcctatcctttcaatgataattctagagaaaaagaaaactacatttacggaacttgttactacacagctagtgatcgcactgcttttcccattgacatatctgtcatgcttaaccgaagagcaataaatgacgagacatcatattgtattcgtataacttggtcctggaacacaggagatgccccagaggtgcaaacctctgctacaaccctagtcacctccccatttaccttttactacatcagagaagacgactgacaaataaagtttaacttgtttatttgaaaatcaattcacaaaatccgagtagttattttgcctcccccttcccatttaacagaatacaccaatctctccccacgcacagctttaaacatttggataccattagatatagacatggttttagattccacattccaaacagtttcagagcgagccaatctggggtcagtgatagataaaaatccatcgggatagtcttttaaagcgctttcacagtccaactgctgcggatgcgactccggagtctggatcacggtcatctggaagaagaacgatgggaatcataatccgaaaacggtatcggacgattgtgtctcatcaaacccacaagcagccgctgtctgcgtcgctccgtgcgactgctgtttatgggatcagggtccacagtgtcctgaagcatgattttaatagcccttaacatcaactttctggtgcgatgcgcgcagcaacgcattctgatttcactcaaatctttgcagtaggtacaacacattattacaatattgtttaataaaccataattaaaagcgctccagccaaaactcatatctgatataatcgcccctgcatgaccatcataccaaagtttaatataaattaaatgacgttccctcaaaaacacactacccacatacatgatctcttttggcatgtgcatattaacaatctgtctgtaccatggacaacgttggttaatcatgcaacccaatataaccttccggaaccacactgccaacaccgctcccccagccatgcattgaagtgaaccctgctgattacaatgacaatgaagaacccaattctctcgaccgtgaatcacttgagaatgaaaaatatctatagtggcacaacatagacataaatgcatgcatcttctcataatttttaactcctcaggatttagaaacatatcccagggaataggaagctcttgcagaacagtaaagctggcagaacaaggaagaccacgaacacaacttacactatgcatagtcatagtatcacaatctggcaacagcgggtggtcttcagtcatagaagctcgggtttcattttcctcacaacgtggtaactgggctctggtgtaagggtgatgtctggcgcatgatgtcgagcgtgcgcgcaaccttgtcataatggagttgcttcctgacattctcgtattttgtatagcaaaacgcggccctggcagaacacactcttcttcgccttctatcctgccgcttagcgtgttccgtgtgatagttcaagtacaaccacactcttaagttggtcaaaagaatgctggcttcagttgtaatcaaaactccatcgcatctaatcgttctgaggaaatcatccacggtagcatatgcaaatcccaaccaagcaatgcaactggattgtgtttcaagcaggagaggagagggaagagacggaagaaccatgttaatttttattccaaacgatctcgcagtacttcaaattgtagatcgcgcagatggcatctctcgcccccactgtgttggtgaaaaagcacagctagatcaaaagaaatgcgattttcaaggtgctcaacggtggcttccagcaaagcctccacgcgcacatccaagaacaaaagaataccaaaagaaggagcattttctaactcctcaatcatcatattacattcctgcaccattcccagataattttcagctttccagccttgaattattcgtgtcagttcttgtggtaaatccaatccacacattacaaacaggtcccggagggcgccctccaccaccattcttaaacacaccctcataatgacaaaatatcttgctcctgtgtcacctgtagcgaattgagaatggcaacatcaattgacatgcccttggctctaagttcttctttaagttctagttgtaaaaactctctcatattatcaccaaactgcttagccagaagccccccgggaacaagagcaggggacgctacagtgcagtacaagcgcagacctccccaattggctccagcaaaaacaagattggaataagcatattgggaaccgccagtaatatcatcgaagttgctggaaatataataaggcagagtttcttgtaaaaattgaataaaagaaaaatttgccaaaaaaacattcaaaacctctgggatgcaaatgcaataggttaccgcgctgcgctccaacattgttagttttgaattagtctgcaaaaataaaaaaaaaaacaagcgtcatatcatagtagcctgacgaacagatggataaatcagtctttccatcacaagacaagccacagggtctccagctcgaccctcgtaaaacctgtcatcatgattaaacaacagcaccgaaagttcctcgcggtgaccagcatgaataattcttgatgaagcatacaatccagacatgttagcatcagttaacgagaaaaaacagccaacatagcctttgggtataattatgcttaatcgtaagtatagcaaagccacccctcgcggatacaaagtaaaaggcacaggagaataaaaaatataattatttctctgctgctgttcaggcaacgtcgcccccggtccctctaaatacacatacaaagcctcatcagccatggcttaccagacaaagtacagcgggcacacaaagcacaagctctaaagtgactctccaacctctccacaatatatatatacacaagccctaaactgacgtaatgggagtaaagtgtaaaaaatcccgccaaacccaacacacaccccgaaactgcgtcaccagggaaaagtacagtttcacttccgcaatcccaacaggcgtaacttcctctttctcacggtacgtgatatcccactaacttgcaacgtcattttcccacggtcgcaccgccccttttagccgttaaccccacagccaatcaccacacgatccacactttttaaaatcacctcatttacatattggcaccattccatctataaggtatattattgatgatg

SEQ ID NO: 266 - DNA, 34764 bp, Human adenovirus
  misc_feature 1..34764: note = Human adenovirus 14, GenBank Accession No. AY803294
  source 1..34764: mol_type = genomic DNA
catcatcaataatataccttatagatggaatggtgccaatatgtaaatgaggtgattttaaaaagtgtgggctgtgtggtaattggctgtggggttaacggctaaaaggggcggcgcggccgtgggaaaatgacgttttttgggggtggagtgtttttgcaagttgtcgcggtaaatgtgacgcaaacaaaggctttttttttacggaactacttagtgttcccacggtatttaacaggaaatgaggtagttttggccggatgcaagtaaaaattgttcattttcgcgcgaaaactgaatgaggaagtggttttctgaataatgcggtatttatggcagggtggagtatttgttcagggccaggtagactttgacccattacgtggaggtttcgattaccgcggaggtttcgattaccgtgttttttacctaaatttccgcgtaccgtgtgaaagtcttctgtttttacgtaggtgtcagctgatcgctacggtatttatacctcagggtttgtgtcaagaggccactcttgagtgccagcgagaagagttttctcctctgcgccggcagtttaatattaaaaaaaatgagacacttgcgatttatgcctcaggaaataatttctgctgagactggaaacgaaatactggagtttgtggtgcacgccctgatgggagacgatccggagccacctgtgcagctttttgagcctcctacgcttcaggaactgtatgatttagaggtagagggatcggaggattctaatgaggaagctgtgaatggcttttttaccgattctatgcttttagctgctaatgaaggattagaattagatccgcctttggacactttcgatactccaggggtgattgtggaaagcggtacagctgtaagaaaattacctgatttgggttccgtggactgtgatttgcactgctatgaagacgggtttcctttgagtgatgaggaggaccatgaaaaggagcagtctatgcagactgcagcgggtgagggagtgaaggctgccattggttttcagttggattgcccggagcttcctggacatggctgtaagtcttgtgaatttcacaggaaaaatactggagtaaaggaactgttatgttcgctttgttatatgagagcgcactgccactttatttacagtaagtgtgtttaagttaaaatttaaaggaatatgctgtttttcacatgtatattgagtgggaaatttgtgcttcttattataggtcctgtgtctgatgctgatgagtcaccatctcctgattctactacctcacctcctgagattcaagcacctgttcctgtggacgtgcacaagcccattcctgtaaagcttaagcctggaaaacgtccagcagtggaaaaactcgaggacttgttacagggtggggacggacctttggacttgagtacacggaaacggccaagacaataagtgttccatatccgtgtttacttaaggtgacgtcaatatttgtgtgagagtgcaatgtaataaaaatatgttaactgtgtactggtttttattgctttttgggcggggactcaggtatataagtagaagcagacctgtgtggttagctcatagaagctggctttgattcatggaggtttgggccattttggaagaccttagaaagactaggcaactgttagagaacgcttcggacggagtctccggtttttggagattctggttcgctagtgaattagctagggtagtttttaggataaaacaggactataaagaagaatttgaaaagttgttggtagattgtccaggactttttgaagctcttaatttgggccatcaagttcactttaaagaaaaagttttatcagttttagacttttcgaccccaggtagaactgccgctgctgtggcttttcttacttttatattagataaatggatcccgcagactcatttcagcaggggatacgttttggatttcgtagccacagcattgtggagaacatggaaggttcgcaagatgaggacaatcttaggttactggccagtgcagcctttgggtgtagcgggaatcctgaggcatccaccggtcatgccagcggttctggaggaggaacagcaagaggacaacccgagagccggcctggaccctccagtggaggaggcggagtagctgacttgtctcctgaactgcaacgggtgcttactggatctacgtccactggacgggataggggcgttaaaagggagagggcatctagtggtactgatgctagatctgagttggctttaagtttaatgagtcgcagacgtcctgaaaccatttggtggcatgaggtccagaaagagggaagggatgaagtttctgtattgcaggagaaatattcactggaacaggtgaaaacatgttggttggagcctgaggatgattgggaggtggccattaaaaattatgccaagatagctttgaggcctgataaacagtataagattactagacggattaatatccggaatgcttgttacatatctggaaatggggctgaggtggtaatagatactccagacaagacagttattagatgctgcatgatggatatgtggcctggagtagtcggtatggaagcagtaacttttgtaaatgttaagtttaggggagatggttataatggaatagtgtttatggccaataccaaacttatattgcatggttgtagcttttttggttttaacaatacctgtgtagatgcctggggacaggttagtgtacggggatgtagtttctatgcgtgttggattgccacagctggcagaaccaagagtcaattgtctctgaagaaatgcatattccaaagatgtaacctgggcattcttaatgaaggcgaagcaagggtccgccactgcgcttctacagatactggatgttttattttaattaagggcaatgccagcgtaaagcataacatgatttgcggtgcttccgatgagaggccttatcaaatgctcacttgtgccggagggcattgtaacatgctggctactgtgcatattgtttctcatcaacgcaaaaaatggcctgtttttgatcacaatgtgttgaccaagtgtaccatgcatgcaggtgggcgtagaggaatgtttatgccttaccagtgtaacatgaatcatgtaaaagtgttgttggaaccagatgccttttccagaatgagtctaacaggaatgtttgacatgaacatgcaaatctggaagatcctgaggtatgatgatacaagatcgagggtgcgcgcatgcgaatgcggaggcaagcatgccaggttccagccggtgtgtgtagatgtgactgaagatctgagaccggatcatttggttattgcccgcactggagcagagttcggatccagtggagaagaaactgactaaggtgagtattgggaaaactttggggtgggattttcagatggacagattgagtaaaaatttgtttttctgtcttgcagctgtcatgagtggaaacgcttcttttaatgggggagtcttcagcccttatctgacagggcgtctcccatcctgggcaggagttcgtcagaatgttatgggatctactgtggatggaagacccgtccaacccgccaattcttcaacgctgacctatgctactttaagttcttcacctttggacgcagctgcagccgccgctgccgcctctgttgccgctaacactgtgcttggaatgggttactatggaagcatcctggctaattccacttcctctaataacccttctaccctgactcaggacaagttacttgtccttttggcccagctggaggctttgacccaacgtctgggtgaactttctcagcaggtggccgagttgcgagtacaaactgagtctgctgtcggcacggcaaagtctaaataaaaaaaaaaaattccagaatcaatgaataaataaacgagcttgttgttgatttaaaatcaagtgttttttatttcatttttcgcgcacggtatgccctagaccaccgatctcgatcattgagaacacggtggattttttccaaaatcctataaaggtgggattgaatgtttagatacatgggcattaggccgtctttggggtggagatagctccattgaagggattcatgctccggggtagtgttgtaaattacccagtcataacaaggtcgctgtgcatggtgttgcacaatatcttttagaagtaggctgattgccacagataagcccttggtgtaggtgtttacaaaccggttgagctgggaggggtgcattcggggtgaaattatgtgcattttggattggatttttaagttggcaatattgccgccaagatctcgtcttgggttcatgttatgaagtaccaccaagacggtgtatccggtacatttaggaaatttatcgtgcagcttggatggaaaagcgtggaaaaatttggagacacccttgtgtcctccgagattttccatgcactcatccatgataatagcaatagggccgtgggcagcagcgcgggcaaacacgttccgtgggtctgacacatcatagttatgttcctgagttaaatcatcataggccattttaataaatttgggacggagagtacccgattggggtatgaatgttccttcgggccccggagcatagttcccctcacagatttgcatttcccaagctttcagttccgagggtggaatcatgtccacctggggggctataaagaacaccgtttctggggctggggtaattagttgggatgatagcaagtttctgagcaattgagatttgccacatccggtggggccataaatgattccgattacaggttgcagttggtagtttagggaacggcaactgccgtcttctcgaagcaagggggccacctcgttcatcatttcccttacatgcatattttcccgcaccaaatccattaggaggcgctctcctcctagtgatagaagttcttgtagtgaggaaaagtttttcagcggttttagaccgtcagccatgggcattttggagagagtctgttgcaaaagttctagtctgttccacagttcagtgatgtgttctatggcatctcgatccagcagacctcctcgtttcgcgggtttggacggctcctggagtagggtatgagacgatgggcgtccagcgctgccagggttcggtccttccagggtctcaaagttcgggtcagggttgtttccgtcacagtgaaggggtgtgcgcctgcttgggcgcttgccagggtgcgcttcagactcatcctgctggtcgaaaacttgtgccgcttggcgccctgtatgtcggccaagtagcagtttaccatgagttcgtagttgagcgcctcggctgcgtggcccttggcgcggagcttacctttggaagttttcttgcataccgggcagtataggcatttcagcgcatacagcttgggcgcaaggaaaatggattctggggagtatgcatccgcgccgcaggaggcgcaaacagtttcacattccaccagccaggttaaatccggttcattggggtcaaaaacaagttttccgccatattttttgatgcgtttcttacctttggtctccatgagttcgtgtcctcgttgagtgacaaacaggctgtccgtgtccccgtagactgattttacaggcctcttttccagtggagtgcctcggtcttcttcgtataggaactctgaccactctgatacaaaggcgcgcgtccaggccagcacaaaggaggctatgtgggaggggtagcgatcgttgtcaaccagggggtccaccttttccaaagtatgcaaacacatgtcactctcttcaacatccaggaatgtgattggcttgtaggtgtatttcacgtgacctggggtcccagctgggggggtataaaagggggcggttctctgctcttcctcactgtcttccggatcgctgtccaggaacgtcagctgttggggtaggtattccctctcgaaggcgggcatgacctctgcactcaggttgtcagtttctaagaacgaggaggatttgatattgacagtgccgcttgagatgcctttcatgaggttttcgtccatttggtcagaaaacacaatttttttattgtcaagtttggtggcaaatgatccatacagggcgttggataaaagtttggcaatggatcgcatggtttggttcttttccttgtccgcgcgctctttggcagcgatgttgagttggacatattcgcgtgccaggcacttccattcggggaagatagttgtcaattcatctggcacaattctcacttgccaccctcggttatgcaaggtaattaaatccacactggtggccacctcgcctcgaaggggttcgttggtccagcagagcctacctcctttcctagaacagaaaggtggaagtgggtctagcataagttcatcgggagggtctgcatccatggtaaagattccaggaagtaaatccttatcaaaatagctgatgggagtggggtcatctaaggccatttgccattctcgagctgccagtgcgcgctcatatgggttaaggggactgccccagggcatgggatgggtgagtgcagaggcatacatgccacagatgtcatagacgtagatgggatcctcaaagatgcctatgtaggttggatagcatcgcccccctctgatacttgctcgcacatagtcatatagttcatgtgacggcgctagcagccccggacccaagttggtgcgattgggtttttctgttctgtagacaatctggcgaaagatggcgtgagaattggaagagatggtgggtctttgaaaaatgttgaagtgggcatgaggtagacctacagagtctctgataaagtgggcataagattcttcaagcttggttaccagttgggcggtgacaagtacgtccagggcgcagtagtcaagtgtttcttgaatgatgtcataacctggttggtttttcttttcccacagttcgcggttgagaaggtattcttcgcgatccttccagtactcttctagcggaaacccgtctttgtctgcacggtaagatcctagcatgtagaactgattaactgccttgtaagggcagcagcccttctctacgggtagagagtatgcttgagcagcttttcgtagcgaagcgtgagtaagggcgaaggtgtctctaaccatgactttgacaaattggtatttaaagtccatgtcgtcacaggctccctgttcccagagttggaagtctacccgtttcttgtaggcggggttgggcaaagcgaaagtaacatcgttgaagagaatcttaccggctctgggcataaaattgcgagtgatgcgaaaaggctgtggtacttccgctcgattgttgatcacctgggcagctaggacgatctcgtcgaagccgttgatgttgtgtcctacaatgtataattctatgaaacgcggcgtgcctctgacgtgaggtagcttattgagctcatcaaaggttaggtctgtagggtcagataaggcgtagtgttcaagggcccattcgtgcagatgaggatttgcatgtaggaatgatgaccaaagatccaccgccagtgctgtttgtaactggtcccgatactgacgaaaatgctggccaattgccattttttctggagtgacacagtagaaggttccgggatcttgttgccatcgatcccacttaagtttaatggctagatcgtgggccatgttgacgagacgctcttctcctgagagtttcatgaccagcatgaaaggaactagttgtttgccaaaggaccccatccaggtgtaagtttccacatcgtaggtcaggaagagtctttctgtgcgaggatgagagccgattgggaaaaactggatttcctgccaccagttggaggattggctgttgatgtgatggaagtagaagtttctgcggcgcgccgagcattcgtgtttgtgcttgtacagacggccgcagtagtcgcagcgttgcacgggttgtatctcgtgaatgagctgtacctggcttcccttgacgagaaatttcagtgggaagccgaggcctggcgattgtatctcgtgctcttctatattcgctgtattggcctgttcatcttctgtttcgatggtggtcatgctgacgagcccccgcgggaggcaagtccagacctcggcgcgggaggggcggagctgaaggacgagagcgcgcaggctggagctgtccagagtcctgagacgctgcggactcaggttagtaggtagggacagaagattaacttgcatgatcttttccagggcgtgcgggaggtttagatggtacttgatttccacaggttcgtttgtagagacgtcaatggcttgcagggttccgtgtcctttgggtgccactaccgtacctttgttttttcttttgatcggtggtggctctcttgcttcttgcatgcttaaaagcggtgacggggacgcgcgccgggcggcagcggttgttccggacccgggggcatggctggtagtggcacgtcggcgccgcgcacgggcaggttctggtactgcgctctgagaagacttgcgtgcgccaccacgcgtcgattgacgtcttgtatctgacgtctttgggtgaaagctaccggccccgtgagcttgaacctgaaagagagttcaacagaatcaatttcggtatcgttaacggcagcttgtctcagtatttcttgtacgtcaccagagttgtcctggtaggcgatctccgccatgaactgctcgatttcttcctcctgaagatctccgcgacccgctctctcgacggtggccgcgaggtcattggagatacggcccatgagttgggagaatgcattcatgcccgcctcgttccagacgcggctgtaaaccacggccccctcggagtctcttgcgcgcatcaccacctgagcgaggttaagctccacgtgtctggtgaagaccgcatagttgcataggcgctgaaaaaggtagttgagtgtggtggcgatgtgttcggcgacaaagaaatacatgatccatcgtctcagcggcatttcgctgacatcgcccagagcttccaagcgctccatggcctcgtagaagtccacggcaaaattaaaaaactgggagtttcgcgcggacacggtcaattcctcctcgagaagacggatgagttcggctatggtggcccgtacttcgcgttcgaaggctcccggcatctcttcttcctcttctatctcttcttccactaacatctcttcttcgtcttcaggcgggggcggagggggcacgcggcgacgtcgacggcgcacgggcaaacggtcgatgaatcgttcaatgacctctccgcggcggcggcgcatggtttcagtgacggcgcggccgttctcgcgcggtcgcagagtaaaaacaccgccgcgcatctccttaaagtggtgactgggaggttctccgtttgggagggaaagggcgctgattatacattttattaattggcccgtagggactgcgcgcagagatctaatcgtgtcaagatccacgggatctgaaaacctttcaacgaaagcgtctaaccagtcacagtcacaaggtaggctgagtacggcttcttgtgggcgggggtggttatgtgttcggtctgggtcttctattccttcttcatctcgggaaggtgagacgatgctgctggtgatgaaattaaagtaggcagttctaagacggcggatggtggcgaggagcaccaggtctttgggtccggcttgctggatacgcaggcgattggccattccccaagcattatcctgacatctagccagatctttgtagtagtcttgcatgagccgttctacgggcacttcttcttcacccgttctgccatgcatacgtgtgagtccaaacccgcgcattggttggaccagtgccaagtcagctacaactctttcggcgaggatggcttgctgtacttgggtgagggtggcttgaaagtcatcaaaatccacgaagcggtggtaagccccggtattgatggtgtaagcacagttggccatgactgaccagttaactgtttggtgaccatggcgcacgagctcggtgtatttaaggcgcgaataggcgcgggtgtcaaaaatgtaatcgttgcaggtgcgcaccagatactggtaccctataagaaaatgcggtggtggttggcggtagagaggccattgttctgtagctggagcgccgggggcgaggtcttccaacataaggcggtgatagccgtagatgtacctggacatccaggtgattcctgcggcggtagtggaagcccgaggaaactcgcgtacgcggttccaaatgttgcgtagcggcatgaagtagttcattgtaggcacggtttgaccagtgaggcgcgcgcagtcattgatgctctatagacacgaagaaaatgaaagcgttcagcgactcgactctgtagcctggaggaacgtgaacgggttgggtcgcggtgtaccccggttcaagacttgtactcgagccggccggagccgcggctaacgtggtattggcactcccgtctcgacccagcctacaaaaatccaggatacggaatcgagtcgttttgctggttgctgaatggcagggaagtgagtcctatttttttttttgccgctcagatgcatcccgtgctgcgacagatgcgtccccaacaacagcccccctcgcagcagcagcaaccacaaaaggctgtccctgcaactactgcaactgccgccgtgagcggtgcgggacagcccgcctatgatctggacttggaagagggcgaaggactggcacgtctaggtgcgccctcgcccgagcggcatccgcgagttcaactgaaaaaagattctcgcgaggcgtatgtgccccaacagaacctatttagagacagaagcggcgaggagccggaggagatgcgagcttcccgctttaacgcgggtcgtgagctgcgtcacggtttggaccgaagacgagtgttgcgggacgaggatttcgaagttgatgaagtgacagggatcagtcctgccagggcacacgtggctgcagccaaccttgtatcggcttacgagcagacagtaaaggaagagcgtaacttccaaaagtcttttaataatcatgtgcgaaccctgattgcccgcgaagaagttactcttggtttgatgcatttgtgggatttgatggaagctatcattcagaaccctactagcaaacctctgaccgcacagctgtttctggtggtgcaacacagcagagacaacgaggctttcagagaggcactgctcaacatcactgaacccgaggggagatggttgtatgatcttatcaacattctacagagtatcatagtgcaggagcggagcctgggcctggccgaaaaggtggctgccatcaattactcggttttaagtttgggaaaatattacgctcgcaagatctacaagactccatacgttcccatagacaaggaggtgaagatagatgggttctacatgcgtatgacgctcaaggtcttgaccctgagcgatgatcttggggtgtaccgcaatgacagaatgcatcgcgccgttagcgccagtaggaggcgcgagttaagcgacagggaactgatgcacagtttgcaaagagctctgactggagctggaacagagggtgagaattactttgacatgggagctgacttgcagtggcagcctagtcgcagggctctgagcgccgcgacggcaggatgtgagcttccttacatagaagaggcggatgaaggcgaggaggaagagggcgagtacttggaagactgatggcacaacccgtgttttttgctagatggaacagcaagcaccggatcccgcaacgcgggcggcgctgcagagccagccgtccggcattaactcctcggacgattggacccaggccatgcaacgtatcatggcgttgacgactcgcaaccccgaagcctttagacagcaaccccaggccaaccgtctatcggccatcatggaagctgtagtgccttcccgctctaatcccactcatgagaaggtcctggccattgtaaacgcgttggtggagaacaaagctattcgtccagatgaggccggactggtatacaacgctcttttagaacgcgtggctcgctacaacagtagcaatgtgcaaaccaatttggaccgtatgataacagatgtacgcgaagccgtgtctcagcgtgaaaggttccagcgcgatgccaaccttggttcgctggtggcgttaaatgcttttttgagtactcagcctgctaatgtgccgcgtggtcaacaggattatactaactttttgagtgcgttgagactgatggtatctgaagtacctcagagcgaagtgtatcagtccggacctgactacttctttcagactagcagacagggtttgcagacggtaaatctgagccaagcttttaaaaaccttaaaggtttgtggggagtgcatgccccggtaggagaaagagcaaccgtgtctagcttgttaactccaaactcccgcctattactactgttggtagctcctttcaccgacagcggcagcatcgaccgtaattcctatttgggttacctactaaacctgtatcgcgaagccatagggcaaagccaggtggacgagcagacctatcaagaaattacccaagtcagtcgcgctttgggtcaggaagacactggcagtttggaagccactctgaacttcttgcttaccaatcggtctcagaagatccctcctcaatatgctcttactgcggaggaggagaggatccttagatatgtgcagcagagcgtgggattgtttctgatgcaagagggggcaactccgactgcggcattggacatgacagcgcgaaatatggagcccagcatgtatgccagtaaccggcctttcattaacaaactgctggactacttgcacagagctgccgctatgaactctgattattttaccaatgccatcctaaacccgcactggctgcccccacctggtttctacacgggcgaatatgacatgcccgaccctaatgacgggtttctgtgggacgacgtggacagtaatgttttttcacctctttttgatcatcgcacgtggaaaaaggaaggcggcgatagaatgcattcttctgcatcgctgtccggggtcatgggtgctaccgcggctgagcccgagtctgcaagtccttttcctagtctacccttttctctacacagtgtacgtagcagcgaagtgggtagaataagtcgcccgagtttaatgggcgaagaggaatacctaaacgattccttgctcagaccggcgagagaaaaaaatttcccaaacaatggaatagaaagtttggtggataagatgagtagatggaagacttatgctcaggatcacagagacgagcctgggatcatggggactacaagtagagcgagccgtagacgccagcgtcatgacagacagaggggtcttgtgtgggaagatgaggattcggccgatgatagcagcgtgttggacttgggtgggagaggaaggggcaacccgtttgctcatttgcgccctcgcttgggtggtatgttgtaaaaaaaaaataaaaaggaaaactcaccaaggccatggcgacgagcgtacgttcgttcttctttattatttgtgtctagtataatgaggcgagtcgtgctaggcggagcggtggtgtatccggagggtcctcctccttcgtacgagagcgtgatgcagcagcagcaggcgacggcggtgatgcaatccccactggaggctccctttgtacctccgcgatacctggcacctacggagggcagaaacagcattcgttactcggaactggcacctcagtacgataccaccaggttgtatctggtggacaacaagtcggcggacattgcttctctgaactatcagaatgaccacagcaacttcttgaccacggtggtgcagaacaatgactttacccctacggaagccagtacccagaccattaactttgatgaacgatcgcggtggggcggtcagctaaagaccatcatgcatactaacatgcccaacgtaaacgagtatatgtttagtaacaacttcaaagcgcgtgtgatggtgtccagaaaacctcccgaaggtgctgcagttggggatacatatgatcacaagcaggatattttggaatatgagtggttcgagtttactttgccagaaggcaacttttcagttactatgaccattgatttgatgaacaatgccatcatagataactacttgaaagtgggcagacagaatggagtgcttgaaagtgacattggtgttaagttcgacaccaggaacttcaagctgggatgggatcccgaaaccaagttgattatgcctggagtgtatacgtatgaagcctttcatcctgacattgtcttactgcctggctgtggagtggactttaccgaaagtcgtttgagcaaccttcttggtatcagaaaaaaacagccatttcaagagggttttaagattttgtatgaagatttagaaggaggtaatattccggccctcttggatgtagatgcctatgagaacagtaagaaagaacaaaaagccaaaatagaagctgctgcggaagctaaggcaaacatagttgccagcgactttacaagggttgctaacgctggagaggtcagaggagacaattttgcaccaacacctgttccgactgcagaatcattattggccgatgtaactggaggaacggacgtgaaactcactattcaacctgtagaaaaagatagtaagaatagaagctataatgtgttggaagataaaatcaacacagcctatcgcagttggtacctttcgtacaattatggcgatcccgaaaaaggagtgcgttcctggacattgctcaccacctcagatgtcacctgcggagcagagcaggtctactggtcgcttccagacatgatgcaggatcctgtcactttccgctccactagacaagtcagcaactaccctgtggtgggtgcagagcttatgcccgtcttctcaaagagcttctacaacgaacaagctgtgtactcccagcagctccgccagtccacctcgcttacgcacgtcttcaaccgctttcctgagaaccagattttaatccgtccgccggcgcccaccattaccaccgtcagtgaaaacgttcctgctctcacagatcacgggaccctgccgttgcgcagcagtatccggggagtccaacgtgtgaccgttactgacgccagacgccgcacctgtccctacgtgtacaaggcactgggcatagtcgcaccgcgcgtcctttcaagccgcactttctaaaaaaatgtccattcttatctcgcccagtaataacaccggttggggtctgcgcgctccaagcaagatgtacggaggcgcacgcaaacgttctacccaacatcccgtgcgtgttcgcggtcattttcgcgctccatggggtgccctcaagggccgcactcgcgttcgaaccaccgtcgatgatgtaatcgatgaggtggttgccgacgcccgtaattatactcctactgcgcctacatctactgtggatgcagttattgacagtgtagtggctgacgctcgcaactatgctcgacgtaagagccggcgaaggcgcattgccagacgccaccgagctaccactgccatgcgagccgcaagagctctgctacgaagagctagacgcgtgggacgaagagccatgcttagggcggccagacgtgcagcttcgggcgccagcgccggcaggtcccgcaggcaagcagccgctgtcgcagcggcgactattgccgacatggcccaaacgcgaagaggcaatgtatactgggtgcgtgacgctgccaccggtcaacgtgtacccgtgcgcacccgtccccctcgcacttagaagatactgagcagtctccgatgttgtgtcccagcggcgaggatgtccaagcgcaaatacaaggaagaaatgctgcaggttatcgcacctgaagtctacggccaaccgctgaaggatgaaaaaaaaccccgcaaaatcaagcgggctaaaaaggacaaaaaagaagaggaagatggcgatgatgggctggcggagtttgtgcgcgagtttgccccacggcgacgcgtgcaatggcgtggacgcaaagttcgacatttgttgagacctggaacttcggtggtctttacacccggcgagcgttcaagcgctacttttaagcgttcctatgatgaggtgtacggggatgatgatattcttgagcaggcggctgaccgattaggcgagtttgcttatggcaagcgtagtagaataaatcccaaggatgagacagtgtccatacccttggatcatggaaatcccacccctagtcttaaaccggtcactttgcagcaagtgttacccgtaactccgcgaacaggtgttaaacgcgaaggtgaagatttgtatcccactatgcaactaatggtacccaaacgccaaaagttggaggacgttttggagaaagtaaaagtggatccagatattcaacctgaggttaaagtgagacccattaagcaggtagcgcctggtctgggagtacaaactgtagacattaagattcccactgaaagtatggaagtgcaaactgaacccgcaaagcctactgccacctccactgaagtgcaaacggatccatggatgccgatgcctattacaactgacgccgccggtcccactcgaagatcccgacgaaagtacggtccagcaagtctgttgatgcccaactatgttgtacacccatctattattcctactcctggttaccgaggcactcgctactatcgcagccgaaacagtacctcccgccgtcgccgcaagacacctgcaaatcgcagtcgtcgccgtagacgcacaagcaaaccgactcccggcgccctggtgcggcaagtgtaccgcaatagtagtgcggaacctttgacactgccgcgtgcgcgttaccatccaagtatcatcacttaatcaatgttgccgctgcctccttgcagatatggccctcacttgtcgccttcgcgttcccatcactggttaccgaggaagaaattcgcgccgtagaagagggatgttggggcgcggaatgcgacgctacaggcgacggcgtgctatccgcaagcaattgcggggtggttttttgccagccttaattccaattatcgctgctgcaattggcgcgataccaggcatagcttccgtggcggttcaggcctcgcaacgacattgacattggaaaaaaaagtataaataaaaaaaaaaatacaatggactctgacactcctggtcctgtgactatgttttcttagagatggaaaacatcaatttttcatccttggctccgcgacacggcacgaagccgtacatgggcacctggagcgacatcggcacgagccaactgaacgggggcgccttcaattggagcagtatctggagcgggcttaaaaattttggctcaaccataaaaacatacgggaacaaagcttggaacagcagtacaggacaggcgcttagaaataaacttaaagaccagaactttcaacaaaaagtagtcgatgggatagcttccggcatcaatggagtggtagatttggctaatcaggctgtgcagaaaaagataaacagtcgtttggacccgccgccagcaaccccaggtgaaatacaagtggaggaagaaattcctccgccagaaaaacgaggcgacaagcgtccgcgtcccgatttggaagagacgctggtgacgcgcgtagatgaaccgccttcttatgaggaagcaacgaagcttggaatgcccaccactagaccgatagcccctatggctaccggggtaatgaaaccttctcagttgcatcgacccgtcactttggatttgccccctccccctgctgctactgctgtacccgcttctaagcctgtcgctgccccgaaaccagtcgccgtagccaggtcacgtcccgggggcgctcctcgtccaaatgcgcactggcaaaatactctgaacagcatcgtgggtctaggcgtgcaaagtgtaaaacgccgtcgctgcttttaattaaatatggagtagcgcttaacttgcctatctgtgtatatgtgtcattacacgccgtcacagcagcagaggaaaaaaggaagaggtcgtgcgtcgacgctgagttactttcaagatggccaccccatcgatgctgccccagtgggcatacatgcacatcgccggacaggatgcttcggagtacctgagtccgggtctggtgcagttcgcccgcgccacagacacctacttcaatctgggaaataagtttagaaatcccaccgtagcgccaacccacgatgtgaccaccgaccgtagccagcggctcatgttgcgcttcgtgcccgttgaccgggaggacaatacatactcttacaaagtgcggtacaccctggccgtgggcgacaacagagtgctggatatggccagcacgttctttgacattaggggcgtgttggacagaggtcccagtttcaaaccctattctggtacggcttacaactctctggctcctaaaggcgctccaaatgcatctcagtggttggataaaggggttgaaactactgaagaacggcaaaatgaagacggggaaaatgacgaaaaagctacatacacttttggcaatgccccagtaaaagccgatgctgacattacaaaagacggactaccaataggtttggaagtcccagctgaaggtgaccctaaacctatctacgctaataagctttaccaaccagaaccccaggtgggacaggaatcgtggactgatacagatggcactgaagaaaaatacggaggcagagtacttaaaccggacactaaaatgaaaccgtgctatgggtcttttgctaaacctactaatgtgaaaggcggacaggcaaaagtgaaaacagaagaaggcaacaacattgaatatgacattgacatgaacttttttgacttaagatcacaaaaacaaggtcttaaacctaagattgtaatgtatgcagaaaatgtggacctggaatctccagatactcatgttgtgtacaaacctgaagtttcagatgctagttcaaatgctaatcttggacagcagtctatgcccaacagacccaactacattggcttcagagataattttattggtcttatgtactataacagtactggtaacatgggggtgctggctggccaagcatctcagttgaatgcagtggttgacttgcaggacagaaacacagaactgtcttaccaactcttgcttgactccctgggcgatagaaccagatactttagcatgtggaatcaggctgttgacagttatgatcccgatgtgcgtgttattgaaaatcatggtgtggaagatgaacttcccaactactgttttccactggacggcatcggtccgcgaacagatagttacaaggagattcagttaaatggagaccaagcttggaaagatgtaaatccaaatggtatcagtgaacttgttaagggaaatccatttgccatggaaattaaccttcaagccaatctatggcgaagtttcctttattccaatgtggctctgtatctcccagactcgtacaaatacaccccgtccaatgtcactcttccagaaaacaaaaacacctacgactacatgaacgggcgggtggtgccgccatctctagtagacacctatgtgaacattggcgccaggtggtctctggatgctatggacaatgtcaacccattcaaccaccaccgtaacgctggcttgcgttaccgatccatgcttttgggtaacggacgttatgtgcctttccacatacaagtgcctcaaaaattcttcgctgtcaaaaacctgctgcttctcccaggctcctacacttatgagtggaacttcaggaaggatgtgaacatggtgctacagagttccctcggtaacgacctacgggtagatggcgccagcatcagtttcacgagcatcaacctctatgctacctttttccccatggctcacaacaccgcttccacccttgaagccatgctgcggaatgacaccaatgatcagtcattcaacgactatctatctgcagctaacatgctctatcccattcctgccaatgcaaccaatattcccatttccattccttctcgcaactgggcggctttcagaggctggtcatttaccagactcaaaaccaaagaaactccctctttggggtctggatttgacccctactttgtctattctggttctattccctacctggatggtaccttctacctgaaccacacttttaagaaggtttccatcatgtttgactcttcagtgagctggcctggaaatgacaggttactatctcccaacgaatttgaaataaagcgcactgtggatggcgaaggctacaatgtagcccaatgcaacatgaccaaagactggttcttggtacagatgctcgccaactacaacataggctatcagggcttctacattccagaaggatacaaagatcgcatgtattcatttttcagaaacttccagcccatgagcaggcaggtggttgatgaggtcaattacaaagacttcaaggccgtcgccataccctaccaacacaacaactctggctttgtgggttacatggctccgaccatgcgccaaggtcaaccctatcccgctaactatccctatccactcattggaacaactgccgtaaatagtgttacgcagaaaaagttcttgtgtgacagaaccatgtggcgcataccgttctcgagcaacttcatgtctatgggggcccttacagacttgggacagaacatgctttatgccaactcagctcatgctctggacatgacctttgaggtggatcccatggatgagcccaccctgctttatcttctcttcgaagttttcgacgtggtcagagtgcatcagccacatcgcggcatcatcgagacagtctacctgcgtacaccgttctcggccggtaacgctaccacgtaaaaagcttcttgcttcttgcaaacagcagctgcaaccatggcctgcggatcccaaaacggctccagcgagcaagagctcagagccattgtccaagacctgggttgcggaccctattttttgggaacctacgataagcgcttcccggggttcatggcccccgataagctcgcctgtgccattgtaaacacggccggacgtgagacggggggagagcactggttggctttcggttggaacccacgttctaacacctgctacctttttgatccttttggattctcggatgatcgtcttaaacagatttaccagtttgaatatgagggtctcctgcgccgcagcgctcttgctaccaaggaccgctgtattacgctggaaaaatctacccagaccgtgcagggcccccgttctgccgcctgcggacttttctgctgcatgttccttcatgcctttgtgcactggcctgaccgtcccatggacggaaaccccaccatgaaattgctgactggagtgccaaacaacatgcttcattctcctaaagtccagcccaccctgtgtgacaatcaaaaagcactctaccattttctcaatacccattcgccttattttcgctcccatcgtacacacatcgaaagggccactgcgttcgaccgtatggatgtgcaataatgactcatgtaaacaacgtgttgaataaacagcactttattttttacacgtatcaaggctctggattacttatttatttacaagtcgaatgggttctgacgagaatcagaatgacccgcgggcagtgatacgttgcggaactgatacttgggttgccacttgaattcgggaatcaccaacttgggaaccggtatatcgggtaggatgtcactccacagctttctggtcagctgcaaagctcccagcaggtcaggagccgaaatcttgaaatcacaattaggaccagtgctctgagcgcgagagttgcggtacaccggattgcagcactgaaacaccatcagcgacggatgtctcacgcttgccagcacggtgggatctgcaatcatgcccacatccagatcttcagcattggcaatgctgaacggggtcatcttgcaggtctgcctacccatggcgggcacccaattaggcttgtggttgcaatcgcagtgcagggggattagtatcatcttggcctgatcctgtctgattcctggatacacggctctcatgaaagcatcatattgcttgaaagcctgctgggctttactaccctcggtatagaacatcccgcaggacctgctcgaaaactggttagctgcgcagccggcatcattcacacagcagcgggcgtcattgttggctatttgcaccacacttctgccccagcggttttgggtgattttggttcgctcgggattctccttcaaggctcgttgtccattctcgctggccacatccatctcgataatctgctccttctgaatcataatagtgccatgcaggcacttcagcttgccctcataatcattgcagccatgaggccacaacgcacagcctgtacattcccaattatggtgggcgatctgagaaaaagaatgtatcattccctgcagaaatcttcccatcatcgtgctcagtgtcttgtgactagtgaaagttaactggatgcctcggtgctcctcgtttacgtactggtgacagatgcgcttgtattgttcgtgctgctcaggcattagtttaaaagaggttctaagttcgttatccagcctgtacttctccatcagtacacacatcacttccatgcccttctcccaagcagacaccaggggcaagctaatcggattcttaacagtacaggcagcagctcctttagccagaggatcatctttggcaatcttttcaatgcttcttttgccatccttctcaacgatgcgcacgggcgggtagctgaaacctactgctacaagctgcgcctcttctctttcttcttcgctgtcttgactgatgtcttgcatgggaacatgtttggtcttccttggcttctttttggggggtatcgggggaggaggactgtcgctccgttccggagacagggaggattgtgaagtttcgctcaccattaccaactgactgtcggtagaagaacctgaccccacacggcgacaggtgtttctcttcgggggcagaggtggaggcgattgcgaagggctgcggtccgacctggaaggcggatgactggcagaaccccttccgcgttcgggggtgtgctccctgtggcggtcgcttaactgatttccttcgcggctggccattgtgttctcctaggcagagaaacaacagacatggaaactcagccattgctgtcaacatcgccacaagtgccatcacatctcgtcgtcagcgacgaggaaaaggagcagagcttaaccattccaccgcccagtcctgccaccacctctaccctagaagataaggaggtcgacgcatctcatgacatgcagaataaaaaagcgaaagagtctgaaacagacatcgagcaagacccgggctatgtgacaccggtggaacacgaggaagagttgaaacgctttctagagagagaggatgaaaactgcccaaaacagcaagcggataactatcaccaagatgctggaaatagggatcagaacaccgactacctcatagggcttgacggggaagacgcgctccttaaacatctagcaagacagtcactcatagtcaaggatgcattattggacagaactgaagtgcccatcagtgtggaagagctcagccgcgcctacgagcttaaccttttttcacctcgtactccccccaaacgccagccaaacggcacctgcgagccaaatcctcgcttaaacttttatccagcttttgctgtgccagaagtactcgctacttatcacatcttttttaaaaatcaaaaaattccagtctcctgccgcgctaatcgcacccgcgctgacgccctacttaatctgggacctggttcacgcttacctgatatagcttccttggaagaggttccaaaaatcttcgagggtctgggcaataatgagactcgggccgcaaatgctctgcaaaagggagaaaatggcatggatgagcatcacagcgttctggtggaattggagggcgataatgccagactcgcagtactcaagcgaagcgtcgaggtcacacactttgcataccccgctgtcaacctgccccctaaagttatgacggcggtcatggaccagttactcattaagcgcgcaagtcccctttcagaagacatgcatgacccagacgcctgtgatgagggtaaaccagtggtcagtgatgagcagctaacccgatggctggacaccgactctccccgggatttggaagagcgtcgcaagcttatgatggccgtagtgctggttaccgtagaactagagtgtctccggcgtttctttaccgattcagaaaccttgcgcaaactcgaagagaatctgcactacacttttagacacggctttgtgcggcaggcgtgcaagatatctaacgtggaactcaccaacctggtttcctacatgggtattctgcatgagaatcgtctaggacaaagcgtgctgcacagcacccttaagggggaagcccgccgtgattacatccgcgattgtgtctatctctacctgtgccacacgtggcaaaccggcatgggtgtatggcagcaatgtttagaagaacagaacttgaaagagcttaacaagctcttacagaaatctcttaaggttctgtggacagggttcgacgagcgcaccgtcgcttccgacctggcagacctcatcttcccagagcgtcttagggttactttgcgaaacggactgcctgactttatgagccagagcatgcttaacaattttcgctctttcatcctggaacgctccggtatcctgcccgccacctgctgcgcactgccctccgactttgtgcctctcacctaccgcgagtgccccccgccgctatggagtcactgctacctgttccgtctggccaactacctctcctaccactcggatgtgatcgaggatgtgagcggagacggcttgctggagtgtcactgccgctgcaatctgtgcacgccccaccggtccctagcttgcaacccccagttgatgagcgaaacccagataataggcacctttgaactgcaaggccccagcagccaaggcgatgggtcttctcctgggcaaagtttaaaactgaccccgggactgtggacctctgcctacttgcgcaagtttgccccggaagattaccacccctatgaaatcaagttctatgaggaccaatcacagcctccaaaggccgaactttcggcctgcgtcatcacccagggggcaattctagcccaattgcaagccatccaaaaatcccgccaagaatttctactgaaaaagggtaagggggtctaccttgacccccagaccggcgaggaactcaacacaaggttccctcaggatgtcccaacgacgagaaagcaagaagttgaaggtgcagccgccgcccccagaagatatggaggaagattgggacagtcaggcagaggaagcggaggaggacagtctggaggacagtctggaggaagacagtttggaggaggaaaacgaggaggcagaggaggtggaagaagtaaccgccgacaaacagttatccccggctgcggagacaagcaacagcgctatcatctccgctccgagtcgaggaacgcggcggcgtcccagcagtagatgggacgagaccggacgcttcccgaacccaaccaccgcttccaagaccggtaagaaggatcggcagggatacaagtcctggcgggggcataagaatgccatcatctcctgcttgcatgagtgcgggggaaacatatccttcacgcgacgctacttgctattccaccatggggtgaactttccacgcaatgttttgcattactaccgtcacctccacagcccctactatagccagcaaatcccggcaatctcgacagaaaaagacagcggcggcgacctccaacagaaaaccagcagcggcagttaaaaaatacacaacaagtgcagcaacaggaggattaaagattacagccaacgagccagcgcaaacccgagagctaagaaatcggatctttccaaccctgtatgccatcttccagcagagtcggggccaagagcaggaactgaaaataaaaaaccgatctttgcgttcgctcaccagaagttgtttgtatcacaagagcgaagatcaacttcagcgcactcttgaggacgccgaggctctcttcaacaagtactgcgcgctgactcttaaagagtaggcagcgaccgcgcttattcaaaaaaggcgggaattacatcatcctcgtcatgagtaaagaaattcccacgccttacatgtggagttatcagccccaaatgggattggcggcaggcgcctcccaggactactccacccgcatgaattggctcagcgccgggccttctatgatttctcgagttaatgatatacgcgcctaccgaaaccaaatacttttggaacagtcagctcttaccaccacgccccgccaacaccttaatcccagaaattggcccgccgccctagtataccaggaaagtcccgctcccaccactgtattacttcctcgagacgcccaggccgaagtccaaatgactaatgcaggtgcgcagttagctggcggctccaccctatgtcgtcacaggcctcggcataatataaaacgcctgatgattagaggccgaggtattcagcttaacgacgagtcggtgagctctccgcttggtctacgaccagacggaatctttcaaattgccggctgcgggagatcttccttcacccctcgtcagactgttttgactttggaaagttcgtcttcgcaaccccgctcgggcggaatcgggaccgttcaatttgtggaggagtttactccctctgtctacttcaaccctttctccggatctcctgggcactacccggacgagttcataccgaactttgacgcaattagcgagtcagtggacggctacgattgatgtctggtgacgcggctgagctatctcggctgcgacatctagaccactgccgccgctttcgctgttttgcccgggaactcattgagttcatttacttcgaactccccaaggatcaccctcaaggtccggcccacggagtgcggattactatcgaaggtaaaataaactctcgcctgcatcgaattttctcccagcggcccgtgctgatcgagcgagaccagggaaacaccacggtttctatctactgcatttgtaatcacccaggattgcatgaaagcctttgctgtcttatgtgtactgagtttaataaaaactgaattaagactctcctacggactgccgcttcttcaacccggattttacaaccagaagaacgaaacttttcctctcatccaggactctgttaactttacctttcctacttacaaaccagaagctcaacgacaacaccgcttttccagaagcattttccctactaatactactttcaaaaccggaggtgagctccacagtctccccgcagaaaacccttgggtggaagcgggccttgtagtgctaggaattcttgcgggcgggcttgtgattattctttgctacctatacacaccttgcttcactttcctagtggtgttgtggtattggtttaaaaaatggggcccatactagtcttgcttgttttactttcgcttttgggaccgggttctgccaactacaatccatgtctagactttgacccagaaaactgcacacttacttttgcacccgacacaagccgcatctgtggagttcttattaagtgcggatgggaatgcaggtccgttgaaattacacacaataacaaaacctggaacaataccttatccaccacatgggagccaggagttcccgagtggtacactgtctctgtccgaggtcctgacggttccatccgcattagtaacaacacttttattttttctacaatgtgcgatctggccatgttcatgagcaaacagtattctctatggcctcccagcaaggacaacattgtaacgttctccattgcttattgcttgtgcgcttgccttcttactgctttactgtgcgtatgcatacacctgcttgtaaccactcgtatcaaaaacgccaataacaaagaaaaaatgccttaacctctttctgtttacagacatggcttttcttacagctctcatacttgtcagcattgtcactgccgctcacggacaaacagtcgtctctatccctctaggtcataattacactctcataggacccccaatcacttcagaggtcatctggaccaaactgggaagcgttgattactttgatataatctgtaacaaaacaaaaccaataatagtaacctgcaacatacaaaatcttacattaattaatgttagcaaagtttacagcggttactattatggttatgacagatacagtagtcaatatagaaattacttggttcgtgttacccagtccaaaaccacgaaaatgccaaatatggcagaaattcgatccgatgacaattctctagaaacttttacatcttccaccacacctgacgaaaaaaatatcccagattcaatgattgcaattatcgcagcggtggcagtggtgatggcactaacagtaatatgcatgcttttatatgcttgtcgctacaaaaagtttcatcctaaaaaacaagatctcctactaaggcttaacatttaatttctttttacacagccatggtttccactaccacattccttatgcttactagtatagcaactctgacttctgctcgctcacacctcactgtaactataggctcaaactgcacactaaaaggacctcaaggtggtcatgtcttttggtggagaatatatgacaatggatggtttacaaaaccatgtgaccaacctggtagatttttctgcaacggcagagacctaaccattatcaacgtgacagcaaatgacaaaggcttctattatggaaccgactataaaagtagtttagattataacattattgtactgccatccaccactccagcgccccgcaaaactactttctctagcagcagtgccgctaacaatacaatttccaatccaacctttaccgcgcttttaaaacgcactgtgaataattctacaacaatttccacttcaacaatcagcatcatcgctgccgtgacaattggaatatctattcttgtttttaccataacctactacacctgctgctataaaaaagacgaacataaaggtgatccattacttagatttgatatttaatttgttctttttttttttatttacagtatggtgaacaccaatcatggtacctagaaatttcttcttcaccatactcatctgtgcttttaatgtttgcgctactttcacagcagtagccacagcaagcccagactgtataggagcatttgcttcctatgcactttttgcttttgtcacttgcatctgcgtatgtagcatagtctgcctggttattaattttttccaacttctagactggatccttgtgcgaattgcctacctgcgccaccatcccgaataccgcaaccaaaatatcgcggcacttcttagacttatctaaaaccatgcaggctatactaccaatatttttgcttctattgcttccctacgctgtctcaaccccagctacctatagtactccaccagaacaccttagaaaatgcaaattccaacaaccgtggtcatttcttgcttgctatcgagaaaaatctgaaattcccccaactttaataatgattgctggaataattaatgtaatctgttgcaccataatttcatttctgatataccccctatttgattttggctggaatgctcccaatgcacatgattattcccaagacccagaggaacacattcccctacataacatgcaacaaccaatagcgctaatagaatacgaaagtgaaccacaacccccactactccctgctattagttacttcaacctaaccggcggagatgactgaaacactcaccacctccaattccgccgaggatctgcttgatatggacggccgcgtctcagaacagcgactcgcccaactacgcatccgccagcagcaggaacgcgtggccaaagagctcagagatgtcatccaaattcaccaatgcaaaaaaggcatattctgtttggtaaaacaagccaaaatatcctacgagatcaccgctaccgaccatcgcctctcttacgagcttggcccccaacgacaaaaatttacctgcatggtgggaatcaaccccatagttatcacccaacaaagtggagatactaagggttgcattcactgctcctgcgattccatcgagtgcacctacaccctgctgaagaccctatgcggactaagagacctgctacccatgaattaaaaaaatgattaataaaaaatcacttacttaaaatcagcaataaggtctctattgaaattttctcccagcagcacctcacttccctcttcccaactctggtattctaaaccccgttcagcggcatactttctccatactttaaaggggatgtcaaattttagctcctctcctgtacccacaatcttcatctctttcttcccagatgaccaagagagtccggctcagtgactccttcaaccctgtctacccctatgaagatgaaagcacctcccaacacccctttataaacccagggtttatttccccaaatggcttcacccaaagcccagacggagttcttactttaaaatgtttaaccccgctaacaaccacaggcgggtctctacagctaaaagtgggagggggacttacagtagatgacactgatgggaccttacaagaaaacataggtgccaccacaccacttgttaagactgggcactctataggtttatccctaggagccggattgggaacagatgaaaataaactttgtaccaaattgggagaaggacttacattcaattcaaacaacatttgcattgatgacaatattaacaccctgtggacaggagttaaccccaccgaagccaactgtcaaatgatggactccagtgaatctaatgattgcaaattaattctaacactagttaaaactggagccctagtcactgcatttgtttatgttataggagtatctaacaattttaatatgctaactacatacagaaatataaattttactgcggagctgttttttgattctgcgggtaatttactaactagcctgtcatccctaaaaactccacttaatcataaatcaggacaaaacatggctactggtgccattactaatgctaaaagtttcatgcccagcacaactgcttatcctttcaataataattctagagaaaaagaaaactacatttacggaacttgtcactacacagctagtgatcacactgcttttcccattgacatatctgtcatgcttaaccaaagagcaataagagctgatacatcatattgtattcgtataacttggtcctggaacacaggagatgccccagaggggcaaacctctgctacaaccctagttacctccccatttaccttttactacatcagagaagacgactgacaaataaagtttaacttgtttatttgaaaatcaattcacaaactccgagtagttattttgcctcccccttcccatttaacagaatataccaatctctccccacgcacagctttaaacatttggataccattagagatagacatggttttagattccacattccaaacagtttcagagcgagccaatctggggtcagtgatagataaaaatccatcgggatagtcttttaaagcgctttcacagtccaactgatgcggatgcgactccggagtctggatcacggtcatctggaagaagaacgatgggaatcataatccgaaaacgggatcgggcgattgtgtctcatcaaacccacaagcagccgctgtctgcgtcgctccgtgcgactgctgtttatgggatcgggatccacagtgtcctgaagcatgattttaatagcccttaacattaactttctggtgcgatgcgcgcagcaacgcattcttatttcacttagattaatacagtaggtacagcacattatcacaatattgtttaataaaccataattaaaagcactccagccaaaactcatatctgatataatcgcccctgcatgaccatcataccaaagtttaatataaattaaatgacgttccctcaaaaacacactacccacatacatgatctcttttggcatgtgcatattaacaatctgtctgtaccatggacaacgttggttaatcatgcagcccaatataaccttccggaaccacactgccaacaccgctcccccagccatgcattgaagtgaaccctgctgattacaatgacaatgaagaatccaattctctcgaccgtgaatcacttgagaatgaaaaatatctatagtagcacaacatagacataaatgcatgcatcttctcataatttttaactcctcaggatttagaaacatatcccaaggaataggaagctcttgcagaacagtaaagctggcagaacaaggaagaccacgaacacaacttacactatgcatagtcatagtatcacaatctggcaacagcgggtggtcttcagtcatagaagctcgggtttcattttcctcacaacgtggtaactgggctctggtgtaaggatgatgtctggcgcatgatgtcgagcgtgcgcacaaccttgtcataatggagttgcttcctgacattctcgtattttgtatagcaaaacgcggccctggcagaacacactcttcttcgccttttatcctgccgcttagcgtgttccgtgtgatagttcaagtacagccacactcttaagttggtcaaaagaatgctggcttcagttgtaatcaaaactccatcacatctaatcgttctgaggaaatgatccacggtagcatatgcaaatcccaaccaagcaatgcaactggattgcgtttcaagcaggagaggagagggaagagacggaagaaccatgttaatttttattccaaacgatctcgcagtacttcaaattgtagatcgcgcagatggcatctgtcgcccccactgtgttggtgaaaaagcacagctagatcaaaagaaatgcgattttcaaggtgctcaacggtggcttccagcaaagcctccacgcgcacatccaagaacaaaagaataccaaaagaaggagcattttctaactcctcaatcatcatattacagtcctgcaccattcccagataattttcagctttccagccttggattattcgtgtcatttcttgtggtaaatccaatccacacattacaaacaggtcccggagggcgccctccaccaccattcttaaacacaccctcataatgacaaaatatcttgctcctgtgtcacctgtagcaaattgagaatggcaacatcaattgacatgccgttggctctaagttcttctctaagttctagttgtaaatactctttcatattatcaccaaactgcttagccagaagccccccgggaacaagagcaggacacgctacagtgcagtacaagcgcagacctccccaattggctccagcaaaaacaagattggaataagcatattgggaaccaccagtaatgtcatcaaagttgctggaaatataatcaggcagagtttgttgtaaaaattgaataaaagaaaaatttgccaaaaaaacattcaaaacctctgggatgcaaatgcaataagttaccgcgctgcgctccaacattgttagttttgaatgagtctgcaaaaaataaaaaaacaagcgtcatatcagagtagcctgacgaacaggtggataaatcagtctttccatcacaagacaagccacagggtctccagcccgaccctcgtaaaacctgtcatcgtgattaaacaacagcaccgaaagttcctcgcggtgaccagcatgaataattcttgatgaagcatacaatccaaacatgttagcatcagttaaagacaaaaaacagccaatatagcctctgggtataattatgcttaatcgtaaatatagcaaagccacccctcgcggatacaaagtaaaaggcacaggagaataaaaaatataattattcctttgctgctgttcaggcaacgtcgcccccggtccctctaaatacacatacaaagcctcatcagccatggcttaccagacaaagtacagcaggcacacaaagcacaagctctaaagtcactcaccaacctgtccacagtatatatacacaaaccctaaactgacgtaatggggctaaagtacacaaaatcccgccaaacccaacacacaccccgaaactgcgtcaccacaaaagtacagtttcacttccgcaatcccaacaagcggcacttcctctttctcacgggacgtcacatccgcttaacttgcaacctcattttcccacggccgcgccgccccttttagccgttaaccccacagccaattaccacacagcccacactttttaaaatcacctcatttacatattggcaccattccatctataaggtatattattgatgatg

SEQ ID NO: 267 - DNA, 35522 bp, Human adenovirus
  misc_feature 1..35522: note = Human adenovirus 16, GenBank Accession No. AY601636
  source 1..35522: mol_type = genomic DNA
cattatctataatataccttatagatggaatggtgccaacatgtaaatgaggtaatttaaaaaagtgcgcgctgtgtggtgattggctgcggggtgaacggctaaaaggggcgggcaatgctgggatgtgacgtaacttatgtgggaggagttatgttgcaagttatcgcggtaaaggtgacgtaaaacgaggtgtggtttggacacggaagtagacagttttcccacgtttactgacaggatatgaggtagttttgggcggatgcaagtgaaaattctccattttcgcgcgaaaactgaatgaggaagtgaatttctgagtcatttcgcggttatgacagggtggagtatttgccgagggccgagtagactttgaccgtttacgtggaggtttcgattaccgtgtttttcacctaaatttccgcgtacggtgtcaaagtcctgtgtttttacgtaggtgtcagctgatcactagggtatttaaacctgtcgagttccgtcaagaggccactcttgagtgccagcgagaagagttttctcctccgcgctgcgagtcagttttgcgctttgaaaatgagacacctgcgattcctgccacaggagattatctccagcgagaccgggatcgaaatactggagtttgtggtaaataccctgatgggagatgacccggaaccgccagtgcagcctttcgatccacctacgctgcacgatctgtatgatttagaggtagacgggcctgatgatcccaatgaggaagctgtaaatgggttttttactgattctatgctgctagctgccgatgaaggattggacataaaccctcctcctgagacccttgataccccaggggtggttgtggaaagcggcagaggtgggaaaaaattgcctgatctgggagcagctgaaatggacttgcgttgttatgaagagggttttcctccgagtgatgatgaagacggggaaactgaacagtccatccataccgcagtgaatgagggagtaaaagctgccagcgatgtttttaagttggactgtccggagctgcctggacatggctgtaagtcttgtgaatttcacaggaataacactggaatgaaagaactattgtgctcgctttgctatatgagaatgcactgccactttatttacagtaagtgtatttaagtgaaatttaaaggaatagtgtagctgtttaataactgttgaatggtagatttatgtttttgcttgcgattttttgtaggtcctgtgtctgatgatgagtcaccttctcctgattcaactacctcacctcctgaaattcaggcgcccgtacctgcaaacgtatgcaagcccattcctgtgaagcctaagtctgggaaacgccctgctgtggataagcttgaggacttgttggagggtggggatggacctttggaccttagtacccggaaactgccaaggcaatgagtgccctgcagctgtgtttatttagtgacgtcatgtaataaaattatgtcagctgctgagtgttttattgcttcttgggtggggacttggatatataagtaggagcagatctgtgtggttagctcatagcaacctgctgccatccatggaggtttgggctatcttggaagacctgagacagactaggctactgctagaaaacgcctcggacggagtctctggcttttggagattctggttcggtggcgatctagctaggctagtgtttaggataaaacaggactatagggaagaatttgaaaagttattggacgacagtccaggactttttgaagctcttaacttgggccatcaggctcattttaaggagaaggttttatcagttttagatttttctactcctggtagaactgctgctgctgtagcttttcttacttttatattggataaatggatccgccaaacccacttcagcaagggatacgttttggatttcatagcagcagctttgtggagaacatggaaggctcgcaggatgaggacaatcttagattactggccagtgcagcctctgggagtagcagggatactgagacacccaccggccatgccagcggttctggaggaggagcagcaggaggacaatccgagagccggcctggaccctccggtggaggagtagctgacttgtttcctgaactgcgacgggtgcttactaggtctacgtccagtggacaggacaggggcattaagagggaaaggaatcctagtgggaataattcaagaaccgagttggctttaagtttaatgagccgtaggcgtcctgaaactgtttggtggcatgaggttcagagcgaaggcagggatgaagtttcaatattgcaggagaaatattcactagaacaacttaagacctgttggttggaacctgaggatgattgggaggtggccattaggaattatgctaagatatctctgaggcctgataaacagtatagaattactaagaagattaatattagaaatgcatgctacatatcagggaatggggcagaggttataatagatacacaagataaagcagcttttagatgttgtatgatgggtatgtggccaggggttgtcggcatggaagcagtaacatttatgaatattaggtttaaaggggatgggtataatggcattgtatttatggctaacactaagctgattctacatggttgtagcttttttgggtttaataatacttgtgtagaagcttgggggcaagttagtgtgaggggttgtagtttttatgcatgctggattgcaacatcaggtagggtcaagagtcagttgtctgtgaagaaatgcatgtttgagagatgtaatcttggcatactgaatgaaggtgaagcaagggtccgccactgcgcagctacagaaactggctgcttcattctaataaagggaaatgccagtgtgaagcataatatgatctgtggacattcgaatgagaggccttatcagatgctgacctgcgctggtggacattgcaatattctggctaccgtgcatatcgtttcccatgcacgcaagaaatggcctgtatttgaacataatgtgattaccaagtgcaccatgcacataggtggtcgcaggggaatgtttatgccttaccagtgtaacatgaatcatgtgaaggtgatgttggaaccagatgccttttccagagtaagcttaacaggaatctttgatatgaatattcaactatggaagatcctgagatatgatgacactaaaccgagggtgcgcgcatgcgaatgcggaggcaagcatgctagattccagccggtgtgcgtggatgtgactgaagacctgagacccgatcatttggtgcttgcctgcactggagcggagttcggttctagtggtgaagaaactgactaaagtgagtagtgggacgagctgtggaggtgggactttgaggttggtaaggtgggcagattgggtaaattttgttaatttctgtcttgcagctgccatgagtggaagcgcttcttttgaggggggagtatttagcccttatctgacgggcaggctcccaccatgggcaggagttcgtcagaatgtcatgggatccactgtggatgggagacccgtccagcccgccaattcctcaacgctgacctatgccactttgagttcgtcaccattggatgcagctgcagccgccgccgctactgctgccgccaacaccatccttggaatgggctattacggaagcatcgttgccaattccagttcctctaataacccttcaaccctggctgaggacaagctacttgttctcttggctcagctcgaggccttaacccaacgcttaggcgaactgtctaagcaggtggcccagttgcgtgagcaaactcagtctgctgttgccacagcaaagtctaaataaagatcttaaatcaataaataaagaaatacttgttataaaaacaaatgaatgtttatttgatttttcgcgcgcggtatgccctggaccatcggtctcgatcattgagaactcggtggatcttttccagtaccctgtaaaggtgggattgaatgtttagatacatgggcattagtccgtcccgggggtggagatagctccattgaagagcctcttgctccggggtagtgttataaatcacccagtcatagcaaggtcggagtgcatggtgttgcacaatatcttttaggagcagactaattgcaacggggaggcccttagtgtaggtgtttacaaatctgttgagctgggacgggtgcatccggggtgaaattatatgcattttggactggatcttgaggttggcaatgttgccgcctagatcccgtctggggttcatattgtgcagaaccaccaagacagtgtatccggtgcacttgggaaatttatcatgcagcttagagggaaaagcatgaaaaaatttggagacgcctttgtgaccccccagattctccatgcactcatccataatgatagcgatggggccgtgggcagcggcacgggcgaacacgttccgggggtctgaaacatcatagttatgctcctgagtcaggtcatcataagccattttaataaactttgggcgaagggtgccagattgggggatgaaagttccctctggcccgggagcatagtttccctcacatatttgcatttcccaggctttcagttcagagggggggatcatatccacctgcggggctataaaaaatactgtttctggagccggggtgattaactgggatgagagcaaattcctaagcagctgagacttgccgcacccagtgggaccgtaaatgaccccaattacgggttgcagatggtagtttagggagcgacagctgccgtcctcccggagcaggggggccacttcgttcatcatttcccttacatggatattttcccgcaccaagtccgttaggaggcgctctcccccaagggatagaagctcctggagcgaggagaagtttttcagcggcttcagcccgtcagccatgggcattttggaaagagtctgttgcaagagctcgagccggtcccagagctcggtgatgtgctctatggcatctcgatccagcagacctcctcgtttcgcgggttgggacggctcctggagtagggaatcagacgatgggcgtccagcgctgccagggtccgatccttccatggtcgcagcgtccgagtcagggttgtttccgtcacggtgaaggggtgcgcgcctggttgggcgcttgcgagggtgcgcttcagactcatcctgctggtcgagaaccgctgccgatcggcgccctgcatgtcggccaggtagcagtttaccatgagttcgtagttgagcgcctcggccgcgtggcctttggcacggagcttacctttggaagttttatggcaggcggggcagtagatacatttgagggcatacagcttgggcgcgaggaaaatggattcgggggagtatgcatccgcaccgcaggaggcgcagacggtttcgcactccacgagccatgtcagatccggctcatcggggtcaaaaacaagttttccgccatgttttttgatgcgtttcttacctttggtttccatgagttcgtgtccccgctgggtaacaaagaggctgtccgtgtccccgtagactgactttatgggcctgtcctcgagcggagtgccgcggtcctcttcgtagaggaacccagcccactctgatacaaaagcgcgtgtccaggccagcacaaaggaggccacgtgggaggggtagcggtcgttgtcaaccagggggtccaccttctctacggtatgtaaacacatgtccccctcctccacatccaagaatgtgattggcttgtaagtgtaggccacgtgaccaggggtccccgccgggggggtataaaagggggcgggcctctgttcgtcttcactgtcttccggatcgctgtccaggagcgccagctgttggggtaggtattccctctcgaaggcgggcatgacctctgcactcaggttgtcagtttctaggaacgaggaggatttgatattgacagtaccagcagagatgcctttcataagactctcgtccatctggtcagaaaacacaatcttcttgttgtccagcttggtggcaaatgatccatagagggcattggatagaagcttggcgatagagcgcatggtttggttcttttccttgtccgcgcgctccttggcggcgatgttaagctggacgtactcgcgcgccacacatttccattcagggaagatggttgtcagttcatccggaactattctgactcgccatcccctattgtgcagggttatcagatccacactggtggctacctcgcctcggaggggctcattggtccagcagagtcgacctccttttcttgaacagaaaggggggagggggtctagcatgaactcatcaggggggtccgcatctatggtaaatattcccggtagcaaatccttgtcaaaatagctgatggtggcgggatcatccaaagtcatctgccattctcgaactgccagcgcgcgctcataggggttaagaggggtgccccagggcatggggtgggtgagcgcggaggcatacatgccacagatatcgtagacatagaggggctcttcgaggatgccgatgtaagtgggataacagcgcccccctctgatgcttgctcgcacatagtcatagagttcatgtgagggggcgagaagacccgggcccagattggtgcggttgggtttttccgccctgtaaacgatctggcgaaagatggcatgggaattggaagagatagtaggtctctggaatatgttaaaatgggcatgagggaggcctacagagtcccttatgaagtgggcatatgactcttgcagcttggctaccagctcggcggtgacaagtacgtctagggcacagtagtcgagagtttcctggatgatgtcataacgcggttggtttttcttttcccacagctcgcggttgagaaggtattcttcgcgatccttccagtactcttcgaggggaaacccgtctttttctgcacggtaagagcccaacatgtagaattgattgactgccttgtagggacagcatcccttctccactgggagagagtatgcttgggctgcattgcgcagcgaggtatgagtgagggcaaaagtgtccctgaccatgactttgaggaattgatacttgaagtcgatgtcatcacaggccccctgttcccagagttggaagtccacccgcttcttgtaggcggggttgggcaaagcgaaagtaacatcattgaagaggatcttgccggccctgggcataaaatttcgggtgattctgaaaggctgagggacctctgctcggttattgataacctgagcggccaagacgatctcatcaaagccattgatgttgtgccccactatgtacagttctaagaatcgaggtgtgcccctgacatgaggcagcttcttgagttcttcaaaagtgaggtctgtagggtcagtgagagcatagtgttcgagggcccattcgtgcaggtgagggttcgctttgaggaaggaggaccagaggtccactgccagtgctgtttgtaactggtcccggtactgacgaaaatgctgcccgactgccatcttttctggggtgacgcaatagaaggtttgggggtcctgctgccagcgatcccacttgagttttatagccaggtcataggcgatgttgacgagccgctggtctccagagagtttcatgaccagcatgaaggggattagctgcttgccaaaggaccccatccaggtgtaggtttccacatcgtaggtgaggaagagcctttctgtgcgaggatgagagccaatcgggaagaactggatctcctgccaccagttggaggaatggctgttgatgtgatggaagtagaactccctgcgacgcgccgagcattcatgcttgtgcttgtacagacggccgcagtactcgcatcgattcacgggatgcacctcatgaatgagttgtacctgacttcctttgacgagaaatttcagtggaaaattgaggcctggcgcttgtacctcgcgctctactatgttgtctgcatcggcatgaccatcttctgtctcgatggtggtcatgctgacgagccctcgcgggaggcaagtccagacctcggcgcggcaggggcggagctcgaggacgagagcgcgcaggtcggagctgtccagggtcctgagacgctgcggagtcaggttagtaggcagtgtcaggagattgacttgcatgatcttttcgagggcgtgagggaggttcagatggtacttgatctccacgggtccgttggtggagatgtcgatggcttgcagggttccgtgccccttgggcgctaccaccgtgcccttgtttttccgtttgggcggcggtggctctgttgcttcttgcatgtttagaagcggtgtcgagggcgcgcaccgggcggcaggggcggctcgggacccggcggcatggccggcagtggtacgtcggcgccgcgcgcgggtaggttctggtactgcgccctgagaagacttgcatgcgcgacgacgcggcggttgacatcctggatctgacgcctctgggtgaacgctaccggccccgtgagcttgaacctgaaagagagttcaacagaatcaatctcggtatcgttgacggcggcttgcctaaggatttcttgcacgtcgccagagttgtcctggtaggcgatctcggccatgaactgctcgatctcttcctcttgaagatctccgcggcccgctctctcgacggtggccgcaaggtcgttggagatgcgtccaatgagttgagagaatgcattcatgcccgcctcgttccagacgcggctgtagaccacagccccctcgggatctctcgcgcgcatgaccacctgggcgaggttgagctccacgtggcgggtgaagaccgcatagttgcataggcgctggaaaaggtagttgagtgtggtggcgatgtgctcggtgacgaagaaatacatgatccatcgtctcagcggcatctcgctaacatcgcccagcgcttccaagcgctccatggcctcgtagaagtccacggcaaagttgaaaaactgggagttacgcgcggacacggtcaactcctcttccagaagacggatgagttcggcgatggtggtgcgcacctcgcgctcgaaagcccccgggatttcttcctcaatttcttcttcttccactaacatctcttcctcttcaggtggggctgcaggaggagggggaacgcggcgacgccggcggcgcacaggcagacggtcgatgaatctttcaatgacctctccgcggcggcggcgcatggtctcggtgacggcacgaccgttctccctgggtctcagagtgaagacgcctccgcgcatctccctgaagtggtgactgggaggctctccgttgggcagggacaccgcgctgattatgcattttatcaattgccccgtaggtactccgcgcaaggacctgatcgtctcaagatccacgggatctgaaaacctttcgacgaaagcgtctaaccagtcgcaatcgcaaggtaggctgagcactgtttcttgcgggcgggggcggctagacgctcggtcggggttctctctttcttctccttcctcctctttggagggtgagacgatgctgctggtgatgaaattaaaataggcagttttgagacggcggatggtggcgaggagcaccaggtctttgggtccggcttgttggatgcgcaggcgatgggccattccccaagcattatcctgacatctggccagatctttatagtagtcttgcatgagtcgttccacgggcacttcttcttcgcccgctctgccatgcatgcgagtgatcccgaacccgcgcatgggctggacaagtgccaggtccgctacaaccctttctgcgaggatggcttgctgcacctgggtgagggtggcttggaagtcgtcaaagtccacgaagcggtggtaagccccggtgttgattgtgtaggagcagttggccatgactgaccagttgactgtctggtgccccggacgcacaatctcggtgtacttgaggcgcgagtaggcgcgggtgtcaaagatgtaatcgttacaggtgcgcaccaggtactggtagccgatgagaaagtgaggcggcggctggcggtataggggccatcgctctgtagccggggcgccaggggcgaggtcttccagcatgaggcggtgataaccgtagatgtacctggacatccaggtgataccggaggcggtggtggatgcccgcgggaactcgcgtacgcggttccagatgttgcgcagcggcatgaagtagttcatggtaggcacggtttggcccgtgagacgcgcacagtcgttgatgctctagacatacgggcaaaaacgaaagcggtcagcggctcgtctccgtggcctggaggctaagcgaacgggttgggctgcgcgtgtaccccggttcgaatctcggatcaggctggagccgcagctaacgtggtactggcactcccgtctcgacccaggcctgcacaaaacctccaggatacggaggcgggtcgttttttttttgctttttcctggatgggagccagtgctgcgtcaagctttagaacactcagttctcggggctgggagtggctcgcgcccgtagtctggagaatcaatcgccagggttgcgttgcggtgtgccccggttcgagtcttagcgcgccggatcggccggtttccgcgacaagcgagggtttggcagcctcgtcatttctaagaccccgccagccgacttctccagtttacgggagcgagccctcttttttttgttttttgttgcccagatgcatcccgtgctgcgacagatgcgcccccagcaacagcccccttctcagcagcagctacaacaacagccacaaaaggctcttcctgctcctgtaactactgcggctgcagccgtcagcggcgcgggacagcccgcctatgatctggacttggaagagggcgagggattggcgcgcctgggggctccatcgcccgagcggcacccgcgggtgcaactaaaaaaggactctcgcgaggcgtacgtgccccaacagaacctattcagggacaggagcggcgaggagccagaggagatgcgagcatctcgatttaacgcgggtcgcgagctgcgccacggtctggatcgaagacgggtgctgcaagacgaggattttgaggtcgatgaagtgacagggatcagcccagctagggcacatgtggccgcggccaacctagtctcggcctacgagcagaccgtgaaggaggagcgcaacttccaaaaatcttttaacaaccatgtgcgcaccctgatcgcccgcgaggaagtgaccctgggtctgatgcacctgtgggacctgatggaggctatcacccagaaccccactagcaaacccctgacagctcagctgtttctggtggttcaacatagcagggacaacgaggcattcagggaggcgttgttgaatatcaccgagcctgatgggagatggctgtatgatctgattaacatcctgcaaagtattatagtgcaggaacgtagcctgggtttggctgagaaagtggcagctatcaactactcggtcttgagcctgggcaaatactacgctcgcaagatctacaagaccccctacgtacccattgacaaggaggtgaagatagatgggttttacatgcgcatgactctcaaggtgttgactttaagcgacgatctgggggtgtatcgcaatgacaggatgcaccgcgcggtgagcgccagcaggaggcgcgagctgagcgacagagaacttatgcacagcttgcaaagggctctaacgggggccggaactgatggggagaactactttgacatgggagcggacttgcaatggcaacccagtcgcagggccatggaggctgcagggtgtgagcttccttacatagaagaggtggatgaagtcgaggacgaggagggcgagtacttggaagactgatggcgcgacccgtatttttgctagatggaacaacagcaggcaccggaccccgcaatgcgggcggcgctacagagccagccgtccggcattaactcctcggacgattggacccaggccatgcaacgtataatggcgctgacgacccgcaaccccgaagcctttagacagcaaccccaggccaaccgcctttcggccatactggaggccgtagtgccctcccgctccaaccccacccacgagaaggtcctggctatcgtgaacgcgctggtggagaacaaggccatccgtcccgatgaggccgggctggtatacaatgctcttttggagcgcgtggcccgttacaacagcagcaacgtgcagaccaacctggaccggatggtgaccgatgtgcgcgaggctgtgtctcagcgcgagcggttccagcgcgacgccaacttggggtcattggtagcgctaaacgctttccttagcacccagcccgccaacgtgccccgtggtcagcaagactatacaaactttttgagtgcattgagactcatggtatctgaggtgccccagagcgaggtgtaccagtccgggccagattacttcttccagaccagcagacagggcttgcagacagtgaacctgacccaggctttcaagaacctgaagggtctgtggggagtgcacgccccagtaggagatcgcgcgaccgtgtctagcttgctgactcccaactcccgcctgctgctgctgctggtatcccccttcactgacagcggtagcatcgaccgcaactcctacttgggctacctgcttaacctgtatcgcgaggctataggacagagccaggtggacgagcagacctatcaagaaatcacccaagtgagccgcgccctgggtcaggaagacacaggcggtttggaagccaccctgaacttcttactaaccaaccggtcgcagaagatccctcctcagtatgcgcttaccgctgaggaggagcggatcctaagatacgtgcaacagagcgttggactgtttttgatgcaggagggggcgacacctaccgccgcgctggatatgacagctcgaaacatggagcccagcatgtatgctagtaacaggcctttcattaacaaactgctggactacctgcacagggcggccgccatgaactctgattatttcaccaatgctattctgaacccacactggctgcccccacctggtttctacactggcgaatacgacatgcccgatcccaatgacgggttcctatgggacgatgtggacagtagcatattttccccgccgccaggttatacggtttggaagaaggaagggggcgatagaaggcactcttccgtatcgttgcccggaacggctggtgctgccgcggccgtgcccgaagctgcgagtcctttccctagcttgtccttttcactaaacagcgttcgcagcagtgaactggggagaataaaccgcccgcgcttgatgggcgaggatgagtacttgaatgactctttgctgaggccagagagggaaaagaacttccctaacaatggaatagagagcctggtggataagatgagtagatggaagacctatgcgcaggatcacagagacgagcccaggatcttgggggctacaagcagaccgagccgtagacgccagcgccacgacaggcagatgggtcttgtgtgggacgacgaggactctgccgatgacagcagcgtgttggacttgggtggaaaaggagttggcaacccgttcgctcatctgcgtccccgtttcggtcgcatgttgtaaaagtgaaagtaaaaataaaaaggcaactcaccaaggccatggcaaccgagcgtgcgttcgttcttttttttgttatctgtatctagtacgatgaggagacgagccgtgctaggcggagcggtggtgtatccggagggtcctcctccttcttacgagagcgtgatgcagcaacaggcggcgatgatacagcccccactggaggctcccttcgtaccccctcggtacctggcgcctacggaagggagaaatagcattcgttactcggagctgtcaccccagtacgataccaccaagttgtatctggtggacaacaagtcggcggacatcgcctccctgaactatcagaacgaccacagcaacttcctgaccacagtggtgcagaacaatgactttacccccacggaggctagcacccagaccattaactttgacgagcggtcgcggtggggcggtcagctgaagaccattatgcacaccaacatgcccaacgtgaacgagtacatgttcagcaacaagtttaaggcgagggtgatggtatctaggaaggctcctgaaggtgttacagtaaatgatcataaagatgatattttgaaatatgagtggtttgagttcactttaccagaaggtaacttctcagctaccatgaccatcgacctgatgaacaatgccatcattgacaactacctgaaaattggcagacagaatggagtgctggaaagtgacattggtgttaagtttgacactagaaacttcaggctcgggtgggaccccgaaactaagttgattatgccaggggtctacacttatgaggcattccatcctgacattgttttgttgcctggttgcggggtagattttactgaaagccgacttagcaacttgcttggcatcaggaagagacatccattccaggagggtttcaaaatcatgtatgaagatcttgaagggggtaatattcctgcccttttggatgtcactgcctatgaggaaagcaaaaaggataccactactgaaacaggcgaaaaggcggtggttaaaacaaccacagtggctgttgcagaggaaaccagtgaagatgataatataactagaggagatacttatataactgaaaaacaaaaacgtgaagctgcagctgcagaactattacttatgtctgaagttaaaaaagagttaaagatccaacctttagaaaaagacagcaagaatagaagctacaatgtcttggaagacaaaatcaacacagcctaccgcagctggtacctgtcctacaattatggtaaccctgagaaaggaataaggtcctggacactgctcaccacttcggatgtcacctgtggagccgagcaggtctactggtcgctccccgacatgatgcaagaccccatcaccttccgctcctcgagacaagtcaacaactacccagtagtgggtgcagagcttatgccggtcttctcaaagagtttctacaatgagcaagccgtgtactctcagcagctccgacagtccacctcgctcacgcacgtcttcaaccgcttccctgagaaccagatcctcatccgcccgccggcgcccacaattaccaccatcagtgaaaacgttcctgctctcacagatcacgggaccctgccgttacgcagcagtatccggggagtccagcgcgtgaccgttactgacgccagacgtcgcacctgtccctacgtttacaaggccctgggcatagtcgcgccgcgcgttctttcaagccgcactttctaaaaaaaaaaaaaaatgtccattctcatctcgcccagtaataataccggttggggactgcatgcgcccaccaagatgtacggaggcgcccgcaaacgctctacccagcaccccgtgcgcgttcgcggtcatttccgcgctccctggggcgccctcaagggccgtacccgcactcggaccacggtcgatgatgtgatcgaccaggtggttgccgatgctcgtaattatactcctactgcgcctacatctactgtggatgcagttattgacagtgtagtggcagacgctcgcgcctatgctcgccggaagagccgaaggaggcgcatcgccaggcgccacagggctactcccgctatgcgagctgcaaaagctattctgcggagggccaaacgtgtgggacgaagagccatgcttagagcggccagacgcgcggcttctggtgctagcagcggcaggtcccgcaggcgcgcggccacggcggcagcagcggccattgccaacatggcccaaccgcgaagaggcaatgtgtattgggtgcgcgatgccactaccggccagcgcgtgcccgtgcgcacccgcccccctcgcacttagaagatactgagcagtctccgatgttgtgtcccagcggcaagtatgtccaagcgcaaatacaaggaagagatgctccaggtcatcgcgcctgaaatctacggtccgccgatgaaggatgaaaaaaagccccgcaaaatcaagcgggttaaaaaggacaaaaaagaagaagatggcgatgatggactggtggagtttgtgcgcgagttcgcgccaagacggcgcgtgcagtggcgcggtcgaaaagtacgccaagtgcttagacccgggaccactgtggtctttacacctggcgagcgttccagcactacttttaaacggtcctatgatgaggtgtatggggatgacgatattattgagcaggcggcagaccgccttggcgagtttgcttatggcaagcgcacaagatccagtcccaaagaggaggcggtatctattcccttggatcatggaaatcccacccctagcctcaaaccagtcaccctgcagcaagtgctgcccgtacctgcgagcagaggcgtaaagcgcgagggtgaggacctatatcccaccatgcagctaatggtgcccaagcggcagagattagaagacgtactggagaaaatgaaagtggatgccgatatccagcctgaggtgaaagtgagacccatcaaggaagtggcgccaggtttgggagtacaaacctttgacatcaagattcccactgagtccatggaagtgcagaccgaacctgcaaaacccacagtcacctcaattgaggttcagacggaaccctggatgcccgcgcccgttgccgcccccagcaccactagaagatcacgtcgaaagtatggcccagcaagtctgctaatgcccaactatgctctgcacccatccatcattcccactccgggttacagaggcactcgctactatcgaagtcggagcaacacctcacgccgccgcaaactacctgcaagtcgcactcgccgtcgccgccgccgcaccactgccagcaaattaactcccgccgccctggtgcggagagtgtaccgcgatggtcgcgctgaacctctgacgctgccgcgcgcgcgctatcatccaagcatcaccacttaatgactgttgacgctgcctccttgcagatatggctctcacttgccgccttcgcgtccccattactggctaccgaggaagaaactcgcgccgtagaaggatgttggggcgagggatgcgccgccacagacgaaggcgcgctatcagcaagcgattagggggtggctttctgccagctcttatacccatcatcgccgcggcgatcggggcgataccaggcatagcttccgtggcggttcaggcctcgcagcgccactaacaatggaaaaatttataaataaaaaatagaatggactctgacgctcctggtcctgtgactatgtttttgtagagatggaagacatcaatttttcatccctggctccgcgacacggcacgaggccgtacatgggcacctggagcgacatcggcacgagccaactgaacgggggcgccttcaattggagcagtatctggagcgggcttaaaaattttggctcgaccataaaaacctatgggaacaaagcttggaacagcagcacagggcaggcccttagaaataagcttaaggagcagaacttccaacaaaaggtggtcgatggtatcgcctctggtattaacggcgtagtggatctagccaaccaggctgtgcagaaacagataaacagccgcctggacccgccgcccgcaactcctggtgaaatggaagtggaggaagagcttcctccgctggagaagcggggcgacaagcgaccgcgtcccgagctggaacagacgttggtgacgcgcgcagacgagcccccttcatacgaggaggcagtaaagctcggaatgcccactaccaggcctgtagctcacatggctaccggggtgatgaaaccttctcagtcgcatcggcctgccaccttggacttgcctcctccccctgcttctgcggcgcctattcccaaacctgtcgctaccagaaagcccaccgccgtacagcccgtcgccgtagccagaccgcgtcctggggcacaccgcgcccgaaagcaaactggcagagtactctgaacagcatcgtgggtctgggcgtgcagagtgtaaagcgccgtcgctgctattaattaaatatggagtagcgcttaacttgcttgtctgtgtgtatgtatcatcaccatgccgccgcagcagaggagaaaggaagaggtcgcgcgccgaggctgagttgctttcaagatggccaccccatcgatgatgccccaatgggcatacatgcacatcgccggacaggatgcttcggagtacctgagtccgggtctggtgcagttcgcccgtgcaacagacacctacttcagtatggggaacaagtttagaaaccccacagtggcgcccacccacgatgtgaccaccgaccgtagccagcgactaatgctgcgcttcgtgcccgttgaccgggaagacaatacctactcttacaaagttcgctacacgctggctgtaggggacaacagagtactggatatggccagcacgttctttgacatccgcggcgtgctggaccggggccctagcttcaaaccctactccgggaccgcctacaacagcctggctcccaagggagcgcccaacacctgccagtggaaggattctgacagcaaaatgcatacctttggggtagctgccatgcccggtgttactgggaaaaagatagaagctgatgggctgcctattggaatagattcaacttctggaactgacacagtaatttatgctgataaaactttccaaccagaaccacaagttggaaatgccagttgggttgacgccaatggtacagaggaaaaatatggaggcagagctctgaaggacactacaaagatgaaaccctgctatggttctttcgccaagcctaccaacaaagaaggtggtcaggctaacttaaaagattcagaaaccgccgccaccactcctaactatgatatagatctggctttctttgacaacaaaaatattgctgctaactacgatccagatattgtaatgtacacagaaaatgttgacttgcagactccagatactcatattgtatacaaacctggaacagaggacaccagctctgaatccaatttgggtcagcaagccatgcctaacagacccaactacattggcttcagagacaattttattgggctcatgtactacaacagcactggcaatatgggggtgctggccggtcaggcctctcagctgaatgctgtggttgacttgcaagacagaaacactgaactgtcctaccagctcttgcttgactctctgggtgacagaacccggtatttcagtatgtggaatcaggcggtggacagctatgatcctgatgtgcgtattattgaaaaccatggtgtggaggacgaattgccaaactattgctttccgttgaatggtgtgggatttacagacacttaccaaggtgttaaagttaaaacagatgcagttgctggaaccagtggaacacagtgggacaaagatgacaccacagttagtactgctaatgaaatccatggaggcaatccttttgccatggaaatcaacatccaagccaatctatggcgaagtttcctttattccaatgtggctttgtatctcccagactcgtataaatacaccccgtccaatgtcactctcccagaaaacaaaaacacctacgactacatgaacgggcgggtggtgccgccatctctagtagacacctatgtgaacattggtgccaggtggtctctggatgccatggacaatgtcaacccattcaaccaccaccgtaacgctggcttgcgttaccgatccatgcttctgggtaacggacgttatgtgcctttccacatacaagtgcctcaaaaattcttcgctgttaaaaacctgctgcttctcccaggctcctacacttatgagtggaactttaggaaggatgtaaacatggttctacagagttcccttggtaacgacctacgggtagatggcgccagcatcagtttcacgagcatcaatctttatgctacttttttccccatggctcacaacaccgcttccacccttgaagccatgctgcggaatgacaccaatgatcagtcattcaacgactacctatctgcagctaacatgctctaccccatacctgccaacgcaaccaatattcccatttccattccttctcgcaactgggcggctttcagaggctggtcatttaccagactgaaaaccaaagaaactccctctttggggtctggatttgacccatactttgtctattccggttctattccctacctggatggtaccttctatctaaatcacacttttaagaaggtttccatcatgtttgactcttcagtgagctggcctggaaatgacaggttactatctcctaacgaatttgaaataaagcgcactgtggatggcgaaggctacaacgtagcccaatgcaacatgaccaaagactggttcttggtacagatgctcgccaactacaacattggctaccagggcttttacatccctgagggatacaaggatcgcatgtactcctttttcagaaacttccagcctatgagcaggcaggtggttgatgaggttaattacactgactacaaagccgtcaccttaccatatcaacacaacaactctggctttgtaggataccttgcgcctactatgagacaaggggaaccttacccagccaattatccatacccgctcatcggaactactgccgttaagagtgttacccaaaaaaagttcctgtgcgacaggaccatgtggcgcataccgttctccagcaacttcatgtccatgggggcccttacagacctgggacaaaacctgctctatgccaactcggcccatgcactggacatgacttttgaggtggatcccatggatgagcccaccctgctttatcttcttttcgaagtcttcgacgtggtcagagtgcaccagccacaccgcggcgtcatcgaggccgtctacctgcgcacaccgttctcggccggcaacgccaccacataagaagcctcttgcttcttgcaagcagcagctgcagccatgtcatgcgggtccggaaacggctccagcgagcaagagctcaaagccatcgtccgagacctgggttgcggtccctatttcctgggaacctttgacaagcgtttcccggggttcatggcccccgacaagctcgcctgcgccatagtcaacactgccggacgcgagacggggggagagcactggctggcttttggttggaacccgcgctccaacacctgctacctttttgatccttttgggttctcggatgagcgactcaaacagatttaccagtttgagtacgaggggctcctgcgccgcagtgcccttgctaccaaagaccgctgcatcaccctggaaaagtccacccagagcgtgcagggcccacgctcagccgcctgtggacttttttgctgtatgttccttcatgcctttgtgcactggcccgaccgtcccatgaacggaaaccccaccatgaagttgctgactggggtgcccaacagcatgctccaatctccccaagtccagcccaccctgcgccgcaaccaggaggcactataccgcttcctaaacacccactcatcttactttcgttctcaccgcgcacgcatcgaaagggccaccgcgtttgaccgtatggatatgcaataagtcatgtaaaaccgtgttcaataaaaagcactttatttttacatgcactaaggctctggttttttgctcattcgttttcatcattcactcagaaatcaaatgggttctggcgggagtcatagtggcccgcgggcagggatacgttgcggaactgtaacctgttctgccacttgaactcggggatcaccagcttgggaactggaatctcgggaaaggtgtcttgccacaactttctggtcagttgcagggcgccaagcaggtcaggagcagagatcttgaaatcacagttggggccggcattctggacacgggagttgcggtacactgggttgcaacactggaacaccatcaaggctgggtgtctcacgcttgccagcacggtcgggtcactgatggtagtcacatccaagtcttcagcattggccatcccaaagggggtcatcttacaggtctgcctgcccatcacgggagcgcagcctggcttgtggttgcaatcgcaatgaatgggaatcagcatcatcctggcttggtcgggggttatccctggatatacggccttcatgaaggcttcgtactgcttgaaagcttcctgagccttacttccctcggtgtagaacattccacaggacttgctggaaaattggttagtagcacagttggcatcatttacacagcagcgggcatcgttgttggccaactgaaccacatttctgccccagcggttctgggtgatcttggctctgtctgggttctccttcatagcgcgctgcccgttctcgctcgccacatccatctcgataatgtggtccttctggatcatgatagtgccatgcaggcatttcaccttgccttcgtaatcggtgcatccatgagcccacagagcgcacccggtgcactcccaattattgtgggcgatctcagaataagaatgcaccaatccctgcatgaatcttcccatcatcgctgtcagggtcttcatgctactaaatgtcagcggaatgccacggtgctcctcgttcacatactggtggcagatacgcttgtactgctcgtgctgctctggcatcagcttgaaagaggttctcaggtcattatccagcctatacctctccattagcacagccatcacttccatgcccttctcccaggcagataccaggggcaagctcaaaggattcctaacagcaatagaagtagctcctttagctatagggtcattcttgtcgatcttctcaacacttctcttgccatccttctcaatgatgcgcaccggggggtagctgaagcccacggccaccaactgagcctgttctctttcttcttcgctgtcctggctgatgtcttgcagagggacatgcttggtcttcctgggcttcttcttgggagggatcgggggaggactgttgctccgttccggagacagggatgaccgcgaagtttcgcttaccagtaccacctggctctcgatagaagaatcggaccccacgcgacggtaggtgttcctcttcgggggcagaggtggaggcgactgagatgggctgcggtctggccttggaggcggatggctggcagagcccattccgcgttcgggggtgtgctcccgttggcggtcgcttgactgatttcctccgcggctggccattgtgttctcctaggcagagaaacaacagacatggaaactcagccatcactgccaacatcgctgcaagcgccatcacacctcgcccccagcagcgacgaggaggagagcttaaccaccccaccacccagtcccgctaccaccacctctaccctcgatgatgaggaggaggtcgacgcagcccaggagatgcaggcgcaggataatgtgaaagcggaagagattgaggcagatgtcgagcaggacccgggctatgtgacaccggcggagcacgaggaggagctgaaacgttttctagacagagaggatgacgaccgcccagagcatcaagcagatggcgatcaccaggaggctggcctcggggatcatgttgccgactacctctccgggcgtgggggggaggacgtgctcctcaaacatctagcaaggcagtcgctcatagttaaagacgcactactcaacctcaccgaagtgcccatcagtgtggaagagcttagccgcgcctacgagctgaacctcttttcgcctcagataccccccaagcggcagccaaacggcacctgcgaggccaaccctcgactcaacttctatccagcttttactgtccccgaagtgctggccacctaccacatcttttttaagaaccaaaagattccagtctcctgccgcgccaaccgcacccgcgcagatgcccttctcaacttgggtccgggagctcgcttacctgatatagcttccttggaagaggttccaaagatctttgagggtctgggaagtgatgagactcgggccgcaaatgctctgcaacagggagagaatggcatggatgaacatcacagcgctctagtggaactggagggtgacaatgcccggcttgcagtgctcaagcgcagtatcgtggtcacccattttgcctaccccgctgttaacctgccgcccaaagtcatgagcgctgtcatggaccatctgctcatcaaacgagcaagtccactttcagaaaaccagaacatgcaggatccagacgcctcggacgagggcaagccggtagtcagtgacgagcagctatctcgctggctgggtaccaactccccccgagatttggaagaaagacgcaagcttatgatggctgtagtgctagtaactgttgagttggagtgtctgcgccgcttttttaccgaccccgagaccctgcgcaagctagaggagaacctgcactacaccttcagacatggcttcgtgcggcaggcatgcaagatctccaacgtggagctcaccaacctggtttcatacatgggcattttgcatgagaaccggctagggcagagcgttctgcacaccaccctgaagggggaggcccgccgcgactacatccgagactgtgtctacctctacctctgccatacctggcagactggtatgggtgtgtggcaacagtgtttggaagagcagaaccttaaagagctggacaagctcttgcagagatccctcaaagccctgtggacaggttttgacgagcgcaccgtcgcctcggacttggcggacatcatcttccccgagcgtcttacggttactctgcgaaacggcctgccagacttcatgagccagagcatgcttaacaactttcgctctttcatcctggaacgctccggtatcctgcctgccacctgctgtgcgctgccctccgactttgtgcctctcacctaccgcgagtgcccaccgccgctatggagccactgctacctattccgcctggccaactacctctcctaccactcggatgtgatagaggatgtgagcggagacggcctgctggaatgccactgccgatgcaatttatgcacaccccaccgctccctcgcctgcaacccccagttgctaagcgagacccagatcatcggcaccttcgagttgcagggtcccaacagtgaaggcgaggggtcttctccggggcagagtctgaaactgacaccggggctgtggacctccgcctacctgcgcaagtttcatcccgaggactatcatccctatgagatcaggttctatgaggaccagtcacatcctcccaaagtcgagctctcagcctgcgtcatcacccagggggcaattctggcccaattgcaagccatccaaaaatcccgccaagaatttctgctgaaaaagggaagcggggtctaccttgacccccagaccggtgaggagctcaacacaaggttcccccaggatgtcccatcgccgaggaagcaagaagctgaaggtgcagctgtcacccccagaggatatggaggaagactgggacagtcaggcagaggaggagatggaagattgggacagccaggcagaggaggtggacagcctggaggaagacagtttggaggaggaagacgaggaggcagaggaggtggaagaagcaaccgccgccaaacagttgtcatcggcggcggagacaagcaagtccccagacagcagcacggctaccatctccgctccgggtcggggggcccagcggcggcccaacagtagatgggacgagaccgggcgattcccaaacccgaccaccgcttccaagaccggtaagaaggagcgacagggatacaagtcctggcgtggacataaaaacgctatcatctcctgcttgcatgaatgcgggggcaacatatccttcacccggcgatacctgcttttccaccacggtgtgaacttcccccgcaatatcttgcattactaccgtcacctccacagcccctactgcagtcagcaagtcccggcaaccccgacagaaaaagacagcagcgacaacggtgaccagaaaaccagcagttagaaaatccacaacaagtgcagcaggaggaggactgaggatcacagcgaacgagccagcgcagaccagagagctgaggaaccggatctttccaaccctctatgccatcttccagcagagtcgggggcaagagcaggaattaaaagtaaaaaaccgatctctgcgctcgctcaccagaagttgtttgtatcacaagagcgaagaccaacttcagcgcactctcgaggacgccgaggctctcttcaacaagtactgcgcgctgactcttaaagagtagcccttgcccgcgctcattcgaaaacggcgggaatcacgtcacccttggcagctgtcctttgccctcgtcatgagtaaagagattcccacgccttacatgtggagctatcagccccaaatggggttggcagcaggtgcttcccaggactactccacccgcatgaattggcttagcgccgggccctcaatgatatcacgggttaatgatatacgagcttatcgaaaccagttactcctagaacagtcagctctcaccaccacaccccgccaacaccttaatccccgaaattggcccgccgccctggtgtaccaggaaaatcccgctcccaccaccgtactacttcctcgagacgcccaggccgaagttcagatgactaacgcaggtgtacagctggcgggcggttccgccctatgtcgtcaccgacctcaacagagtataaaacgcctggtgatcagaggccgaggtatccagctcaacgacgagtcggttagctcttcgcttggtctgcgaccagacggagtcttccagatcgccggctgtgggagatcttccttcactcctcgtcaggctgtgctgactttggagagttcgtcctcgcagccccgctcgggcggcatcggaactctccagtttgtggaggagtttactccctctgtctacttcaaccccttctccggctctcctggccagtacccggacgagttcataccgaacttcgacgcaatcagcgagtcagtggatggctatgattgatgtctaatggtggcgcggctgagctagctcgactgcgacacctagaccactgccgccgctttcgctgtttcgcccgggaactcaccgagttcatctacttcgaactctccgaggagcaccctcagggtccggcccacggagtgcggattaccatcgaagggggaatagactctcgcctgcatcgcatcttctcccagcggcccgtgctgattgagcgcgaccagggaaatacaaccatctccatctactgcatttgtaaccaccccggattgcatgaaagcctttgctgtcttgtttgtgctgagtttaataaaaactgagttaagaccctcctacggactaccgcttcttcaatcaggactttacaacaccaaccagatcttccagaagacccagacccttcctcctctgatccaggactctaactctaccttaccagcaccctccactactaaccttcccgaaactaacaagcttggatctcatctgcaacaccgcctttcacgaagccttctttctgccaatactaccactcccaaaaccggaggtgagctccgcggtcttcctactgacgacccctgggtggtagcgggttttgtaacgttaggagtagttgcgggtgggcttgtgctaatcctttgctacctatacacaccttgctgtgcatatttagtcatattgtgctgttggtttaagaaatgggggccatactagtcgtgcttgctttactttcgcttttgggtctgggctctgctaatctcaatcctcttgatcacgatccatgtctagacttcgacccagaaaactgcacacttacttttgcacccgacacaagccgtctctgtggagttcttattaagtgcggatgggactgcaggtccgttgaaattacacataataacaaaacatggaacaataccttatccaccacatgggagccaggagttcccgagtggtatactgtctctgtccgaggtcctgacggttccattcgcattagtaacaacactttcattttttctgaaatgtgcgatctggccatgtttatgagcaaacagtatgacctatggcctcctagcaaagagaacattgtggcattttccattgcttattgcttggtaacatgcatcatcactgctatcatttgtgtgtgcatacacttgcttatagttattcgccctagacaaagcaatgaggaaaaagagaaaatgccttaacctttttcctcataccttttctttacagcatggcttctgttacagctctaattattgccagcattgtcactgtcgctcacgggcaaacaattgtccatattaccttaggacataatcacactcttgtagggcccccaattacttcagaggttatttggaccaaacttggaagtgttgattattttgatataatttgcaacaaaactaaaccaatatttgtaatctgcaacagacaaaatctcacgttaattaatgtcagcaaaatttataacggttactattatggttatgatagatccagtagtcaatataaaaattacttagttcgcataactcaacccaaatcaacagtgccaactatgacaataattaaaatggctaataaagcattagaaaattttacattaccaacaacgcccaatgaaaaaaacattccaaattcaatgattgcaattattgcggcggtggcattgggaatggcactaataataatatgcatgttcctatatgcttgttgctataaaaagtttaaacataaacaggatccactactaaattttaacatttaattttttatacagatgatttccactacaatttttatcattactagccttgcagctgtaacttatggccgttcacacctaactgtacctgttggctcaacatgtacactacaaggaccccaagaaggccatgtcacttggtggagaatatatgataatggagggttcgctagaccatgtgatcagcctggtacaaaattttcatgcaacggaagagacttgaccattattaacataacattaaatgagcaaggcttctattatggaaccaactataaaaatagtttagattacaacattattgtagtgccagccaccacttctgctccccgcaaatccactttctctagcagcagtgccaaagcaagcacaattcctaaaacagcttctgctatgttaaagcttcgaaaaatcgctttaagtaattccacagccgctcccaatacaattcctaaatcaacaattggcatcattactgccgtggtagtgggattaataattatatttttgtgcataatgtactacgcctgctgctatagaaaacatgaacaaaaaggtgatgcattactaaattttgatatttaattttttatagaattatgatattgtttcaatcaaataccactaacactatcaatgtgcagactactttaaatcatgacatggaaaaccacactacctcctatgcatacacaaacattcagcctaaatacgctatgcaactaagaaatcaccatactaattgtaattggaattcttatactatctgttattctttattttatattctgccgtcaaatacccaatgttcatagaaattctaaaagacgacccatctattctcctatgattagtcgtccccatatggctctgaatgaaatctaagatctttttttttctcttacagtatggtgaacatcaatcatgattcctagaaatttcttcttcaccatactcatctgtgctttcaatgtctgtgctactttcacagcagtagccactgcaagcccagactgtataggaccatttgcttcctatgcactttttgccttcgttacttgcatctgcgtgtgtagcatagtctgcctggttattaattttttccaactggtagactggatctttgtgcgaattgcctacctacgtcaccatcccgaataccgcaatcaaaatgttgcggcactttttaggcttatttaaaaccatgcaggctatgctgccagtcattttaattctgctcctaccctgcattgccctagcttccaccgccactcgcgctacacctgaacaacttagaaaatgcaaatttcaacaaccatggtcatttcttgattgctaccatgaaaaatctgattttcccacatactggatagtgattgttggaataattaacatactttcatgtacctttttctcaatcacaatataccccacatttaattttgggtggaattctcccaatgcactgggttacccacaagaaccacatgaacatatcccactacaacacatacaacaaccactagcactggtagagtatgaaaatgagccacaaccttcactgcctcctgccattagttacttcaacctaaccggcggagatgactgaaatactcaccacctccaattccgccgaggatctgcttgatatggacggccgcgcctcagaacagcgactcgcccaactacgcatacgccagcagcaggaacgtgccgccaaggagctcagggatgctattgaaattcaccaatgcaaaaaaggcatattttgtttggtaaaacaagccaagatatcctacgagattaccaatactgaccatcgcctctcatacgagctcggaccgcagcgacaaaaattcacttgtatggtgggaatcaaccccataatcatcacccagcaagctggagataccaagggttgcatccactgttcctgcagttccgccgagtgcatctacaccctgctgaagaccctctgcggccttcgagacctcctacccatgaactaatcaacccagcccctcacttaccaattacataaagccaattaataaaaacacttacttgaaatcagaaataaggtttctgtctacgttgtttccaagcagcacctcacttccttcttcccaactctggtactctaagcctcggcgggtggcatacttcctccacactttgaaagggatgtcaaattttagttcctcttctttgcccacaatcttcatttctttatccccagatggccaaacgagctcggctaagcagctccttcaatccggtctacccctatgaagatgaaagcagctcacaacacccctttataaaccctggtttcatttcctcaaatggttttgcacaaagcccagatggagttctaactcttaaatgtgttaatccactcactaccgccagcggacccctccaacttaaagttggaagcagtcttacagtagatactatcgatgggtctttggaggaaaatataactgccgcagcgccactcactaaaactaaccactccataggtttattaataggatctggcttgcaaacaaaggatgataaactttgtttatcgctgggagatgggttggtaacaaaggatgataaactatgtttatcgctgggagatgggttaataacaaaaaatgatgtactatgtgccaaactaggacatggccttgtgtttgactcttccaatgctatcaccatagaaaacaacaccttgtggacaggcgcaaaaccaagcgccaactgtgtaattaaagagggagaagattccccagactgtaagctcactttagttctagtgaagaatggaggactgataaatggatacataacattaatgggagcctcagaatatactaacaccttgtttaaaaacaatcaagttacaatcgatgtaaacctcgcatttgataatactggccaaattattacttacctatcatcccttaaaagtaacctgaactttaaagacaaccaaaacatggctactggaaccataaccagtgccaaaggcttcatgcccagcaccaccgcctatccatttataacatacgccactgagaccctaaatgaagattacatttatggagagtgttactacaaatctaccaatggaactctctttccactaaaagttactgtcacactaaacagacgtatgttagcttctggaatggcctatgctatgaatttttcatggtctctaaatgcagaggaagccccggaaactaccgaagtcactctcattacctcccccttctttttttcttatatcagagaagatgactgacaacaaaaaaaataaagatcaacttttttattgaaaatcagtttacaagattcgagtagttattttgcccccctcttcccattttatagaatacacaattctctccccacgcacagctttgaacatttgaattccattagagatagacatagttttagattccacattccacacagtttcagagcgggccaatcttggatcagtgatagatataaatccatcggaacagtctttcaaggtggtttcacagtccaactgctgcggctgcggctccggggtttggattagggtcatctggaagaagaacgatgggagtcataatccgagaacgggatcgggcggttgtgtcttaaacctcgaagcaatcgctgtctgcgccgctccgtgcgactgctgctgatgggatcaggatccacagtctctcgaagcataattttaatagccctcaacattaacatcctggtgcgatgggcacaacaacgcattctaatttcgcttagctcactgcagtaggtacaacacattaccacaatgttgtttaacaggccataattaaaggtgctccagccaaaactcatctcagggataatcatacccgcgtgaccatcgtaccaaatcttaatgtaaattagatgacgccccctccagaacacactgcccacatacataatttccttgggcatatgcatgttcacaatttctctgtaccatggacagcgctggttaatcatacagcccctaataaccttccggaaccacatagctagcactgctcccccagcaatacattgaagagaacccggctgtttacagtgacaatggagaacccacttctctcgcccatggatcacttgagaattaaatatatctatagtggcacaacacaaacataaatgcatgcatcttttcataaccctcaactcttcgggggttaaaaacatatcccagggaataggaagctcttgcaaaacagtaaagctggcagaacaaggaagaccacgaacacaacttacactatgcatagtcatagtatcacaatctggcaacagcgggtggtcttcagtcatagaagctcgggtttcattttcctcacatcgtggtaactgggctctggtgtaagggtgatgtctggcgcatgatgtcgagcgtgcgcgcaaccttgtcataatggagttgcttcctgacattctcgtattttgtatagcaaaatgcggccctggcacaacacacttttcttcgtcttctatcctgccgcttagtgtgttccgtctgataattcaagtacagccacactcttaagttggtcaaaagaatgctggcttcagttgtaatcaaaactccatcatatttaattgttctaaggaaatcatccacggtagcatatgcaaatcccaaccaagcaatgcaactggattgcgtttcaagcagcagaggagagggaagagacggaagaatcatgttaatttttattccaaacgatctcgcagtacttcaaattgtagatcgcgcagatggcatctatcgcccccactgtgttggtgaaaaagcacagctaaatcaaaagaaatgcgattttcaaggtgctcaacggtggcttccaacaaagcctccacgcgcacatccaaaaacaaaagaataccaaaagaaggagcattttctaactcctcaaacatcatattacattcctgcaccattcccagataattttcagctttccagccttgaattattcgtgtcagttcttgtggtaaatccaaaccacacattacaaacaggtcccggagggcgccctccaccaccattcttaaacacaccctcataatgacaaaatatcttgctcctgtgtcacctgtagcaaattaagaatggcatcatcaattgacatgcccttggctctaagttcttctctaagttctagttgtaaatactctctcatattatcaccaaactgcttagccagaagccccccgggaacaatagcaggggacgctacagtgcagtacaagcgcagacctccccaattggctccagcaaaaacaagattagaataagcatactgggaaccaccagtaatatcatcaaagttgctggaaatataatcaggcagagtttcttgtaaaaattgaataaaagaaaaattttccaaagaaacattcaaaacctctgggatgcaaatgcaataggttaccgcgctgcgctccaacattgttagttttgaattagtctgtaaaataaaagaaacaagcgtcatatcatagtagcctgtcgaacaggtggataaatcagtctttccatcacaagacaagccacagggtctccagcttgaccctcgtaaaacctgtcatcgtgattaaacaacagcaccgaaagttcctcgcggtggccagcatgaataattcttgatgaagcatataatccagacatgttagcatcagttaaagagaaaaaacagccaacatagcctctgggtataattatgcttaatcttaagtatagcaaagccacccctcgcggatacaaagtaaaaggcacaggagaataaaaaatataattatttctctgctgctgttcaggcaacgtcgcccccggtccctctaaatacacatacaaagcctcatcagccatggcttaccagacaaagtacagcgggcgcacaaagcacaagctctaaagaagctctaaagacactctccaacctctccacaatatatacacaagccctaaactgacgtaatgggagtaaagtgtaaaaaatcccgccaagcccaacacacaccccgaaactgcgtcagcagggaaaagtacagtttcacttccgcaaacccaacaagcgtaacttcctctttctcacggtacgtcacatccgattaacttgcaacgtcattttcccacggccgcaccgccccttttagccgttcaccccgcagccaatcaccacacagcgcgcacttttttaaattacctcatttacatgttggcaccattccatctataaggtatattattgataatg

SEQ ID NO: 268 - DNA, 35382 bp, Human adenovirus
  misc_feature 1..35382: note = Human adenovirus 21, GenBank Accession No. AY601633
  source 1..35382: mol_type = genomic DNA
ctatctatataatataccttatagatggaatggtgccaatatgcaaatgaggtaatttaaaaaagtgcgcgctgtgtggtgattggctgcggggtgaacggctaaaaggggcgggcaatgctgggaggtgacgtaacttatgtaggaggagttatgttgcaagttatcgcggtaaaggtgacgtaaaacgaggtgtggtttggacacggaagtagacagttttcccacgcttactgacaggatatgaggtagttttgggcggatgcaagtgaaaattctccattttcgcgcgaaaactgaatgaggaagtgaatttctgagtcatttcgcggttatgacagggtggagtatttgccgagggccgagtagactttgaccgtttacgtggaggtttcgattaccgtgtttttcacctaaatttccgcgtacggtgtcaaagtcctgtgtttttacgtaggtgtcagctgatcactagggtatttaaacctgtcgagttccgtcaagaggccactcttgagtgccagcgagaagagttttctcctccgcgctgcgagtcagttttgcgctttgaaaatgagacacctgcgattcctgccacaggagattatctccagcgagaccgggatcgaaatactggagtttgtggtaaataccctgatgggagatgacccggaaccgccagtgcagcctttcgatccacctacgctgcacgatctgtatgatttagaggtagacgggcctgatgatcccaatgaggaagctgtaaatgggttttttactgattctatgctgctagctgccgatgaaggattggacataaaccctcctcctgggacccttgataccccaggggtggttgtggaaagcggcagaggtgggaaaaaattgcctgatctgggagcagctgaaatggacttgcgttgttatgaagagggttttcctccgagtgatgatgaagatggggaaactgaacagtccatccataccgcagtgaatgagggagtaaaagctgccagcgatgtttttaagttggactgtccggagctgcctggacatggctgtaagtcttgtgaatttcacaggaataacactggaatgaaagaactattgtgctcgctttgctatatgagaatgcactgccactttatttacagtaagtgtatttaagtgaaatttaaaggaatagtgtagctgtttaataactgttgaatggtagatttatgtttttacttgcgattttttgtaggtcctgtgtctgatgatgaggcgccttctcctgattcaactacctcacctcctgaaattcaggcgcccgtacctgcaaacgtatgcaagcccattcctgtgaagcctaagtgtgggaaacgccctgctgtggataagcttgaggacttgttggagggtggggatggacctttggaccttagtacccggaaactgccaagacaatgagtgccctgcagctgtgtttatttaatgtgacgtcatgtaataaaattatgtcagctgctgagtgttttattgcttcttgggtggggacttggatatataagtaggagcagatctgtgtggttagctcatagcaacctgctgccatccatggaggtttgggctatcttggaagacctgagacagactaggctactgctagaaaacgcctcggacggagtctctggcttttggagattctggttcggtggtgatctagctaggctagtgtttaggataaaacaggactacagggaagaatttgaaaagttattggacgacagtccaggactttttgaagctcttaacttgggccaccaggctcattttaaggagaaggttttatcagttttagatttttctactcctggtagaactgctgctgctgtagcttttcttacttttatattggataaatggatccgccaaacccacttcagcaagggatacgttttggatttcatagcagcagctttgtggagaacatggaaggctcgcaggatgaggacaatcttagattactggccagtgcagcctctgggagtagcagggatactgagacacccaccggccatgccagcggttctggaggaggagcagcaggaggacaatccgagagccggcctggaccctccggtggaggagtagctgacctgtttcctgaactgcgacgggtgcttactaggtctacgtccagtggacaggacaggggcattaagagggagaggaatcctagtgggaataattcaagaaccgagttggctttaagtttaatgagccgtaggcgtcctgaaactgtttggtggcatgaggttcagagcgaaggcagggatgaagtttcaatattgcaggagaaatattcactagaacaacttaagacctgttggttggaacctgaggatgattgggaggtggccattaggaattatgctaagatatctctgaggcctgataaacagtatagaattactaagaagattaatattagaaatgcatgctacatatcagggaatggggcagaggttataatagatacccaagataaagcagcttttagatgttgtatgatgggtatgtggccaggggttgtcggcatggaagcagtaacatttatgaatattaggtttaaaggggatgggtataatggcattgtatttatggctaacactaagctgattctacatggttgtagcttttttgggtttaataatacttgtgtagaagcttgggggcaagttggtgtgaggggttgtagtttttatgcatgctggattgcaacatcaggtagggtcaagagtcagttgtctgtgaagaaatgcatgtttgagagatgtaatcttggcatactgaatgaaggtgaagcaagggtccgccactgcgcagctacagaaactggctgcttcattctaataaagggaaatgccagtgtgaagcataatatgatctgtggacattcgaatgagaggccttatcagatgctgacctgcgctggtggacattgcaatattcttgctaccgtgcatatcgtttcccatgcacgcaagaaatggcctgtatttgaacataatgtgattaccaagtgcaccatgcacataggtggtcgcaggggaatgtttatgccttaccagtgtaacatgaatcatgtgaaggtgatgttggaaccagatgccttttccagagtgagcttaacaggaatctttgatatgaatattcaactatggaagatcctgagatatgatgacactaaaccgagggtgcgcgcatgcgaatgcggaggcaagcatgctagattccagccggtgtgcgtggatgtgactgaagacctgagacccgatcatttggtgcttgcctgcactggagcggagttcggttctagtggtgaagaaactgactaaagtgagtagtggggcaatatgtggatggggactttcaggttggtaaggtggacagattgggtaaattttgttaatttctgtcttgcagctgccatgagtggaagcgcttcttttgaggggggagtatttagcccttatctgacgggcaggctcccatcatgggcaggagttcgtcagaatgtcatgggatccactgtggatgggagacccgtccagcccgccaattcctcaacgctgacctatgccactttgagttcgtcatcattggatgcagctgcagccgccgccgctactgctgccgccaacaccatccttggaatgggctattacggaagcatcgttgccaattccagttcctctaataacccttcaaccctggctgaggacaagctgcttgttctcttggctcagctcgaggccttaacccaacgcttaggcgaactgtctaagcaggtggcccagttgcgtgagcaaactgagtctgctgttgccacagcaaagtctaaataaagatctcaaatcaataaataaagaaatacttgttataaaaacaaatgaatgtttatttgatttttcgcgcgcggtatgccctggaccatcggtctcgatcattgagaactcggtggatcttttccagtaccctgtaaaggtgggattgaatgtttagatacatgggcattagtccgtctcgggggtggagatagctccattgaagagcctcttgctccggggtagtgttataaatcacccagtcatagcaaggtcggagtgcatggtgttgcacaatatcttttaggagcagactaattgcaacggggaggcccttagtgtaggtgtttacaaatctgttgagctgggacgggtgcatcctgggtgaaattatatgcattttggactggatcttgaggttggcaatgttgccgcctagatcccgtctcggattcatattgtgcagaaccaccaagacagtgtatccggtgcacttgggaaatttatcatgcagcttagagggaaaagcatgaaaaaatttggagacgcctttgtgaccccccagattctccatgcactcatccataatgatagcgatggggccgtgggcagcggcacgggcgaacacgttccgggggtctgaaacatcatagttatgctcctgagtcaggtcatcataagccattttaataaactttgggcggagggtgccagattgggggatgaaagttccctctggcccgggagcatagtttccctcacatatttgcatttcccaggctttcagttccgagggggggatcatgtccacctgcggggctataaaaaataccgtttctggagccggggtgattaactgggatgagagcaaattcctaagcagctgagacttgccgcacccagtgggaccgtaaatgaccccaattacgggttgcagatggtagtttagggagcgacagctgccgtcctcccggagcaggggggccacttcgttcatcatttcccttacatggatattttcccgcaccaagtccgttaggaggcgctctcccccaagggatagaagctcctggagcgaggagaagtttttcagcggcttcagcccgtcagccatgggcattttggaaagagtctgttgcaagagctcgagccggtcccagagctcggtgatgtgctctatggcatctcgatccaacagacctcctcgtttcgcgggttgggacggctcctggagtagggaatcagacgatgggcgtccagcgctgctagggtccgatccttccatggtcgcagcgtccgagtcagggttgtttccgtcacggtgaaggggtgcgcgcctggttgggcgcttgcgagggtgcgcttcagactcatcctgctggtcgagaaccgctgccgatcggcgccctgcaggtcggccaggtagcagtttaccatgagttcgtagttgagcgcctcggccgcgtggcctttggcacggagcttacctttggaagttttatggcaggcggggcagtagatacatttgagggcatacagcttgggcgcgaggaaaatggattcgggggagtatgcatccgcaccgcaggaggcgcagacggtttcgcactccacgagccaggtcagatccggctcatcggggtcaaaaacaagttttccgccatgttttttgatgcgtttcttacctttggtttccatgagttcgtgtccccgctgggtgacaaagaggctgtccgtgtccccgtagaccgactttatgggcctgtcctcgagcggagtgcctcggtcctcttcgtagaggaacccagcccactctgatacaaaagcgcgtgtccaggccagcacaaaggaggccacgtgggaggggtagcggtcgttgtcaaccagtgggtccaccttctctacggtatgtaaacacatgtccccctcctccacatccaagaatgtgattggcttgtaagtgtaggccacgtgaccaggggtccccgccgggggggtataaaagggggcgggcctctgttcgtcctcactgtcttcaggatcgctgtccaggagcgccagctgttggggtaggtattccctctcgaaggcgggcatgacctctgcactcaggttgtcagtttctaggaacgaggaggatttgatattgacagtaccagcagagacgcctttcataagactctcgtccatctggtcagaaaacacaatcttcttgttgtccagcttggtggcaaatgatccataaagggcattggacagaagcttggcgatggagcgcatggtttggttcttttccttgtccgcgcgctccttggcggcgatgttaagctggacgtactcgcgcgccacacatttccattcagggaagatggttgtcagttcatccggaactattctgactcgccatcccctattgtgcagggttatcagatccacactggtggccacctcgcctcggaggggctcattggtccagcagagtcgacctccttttcttgaacagaaaggtgggagggggtctagcatgaactcatcaggggggtccgcatctatggtaaatattcccggtagcaaatctttgtcaaaatagctgatggtggcgggatcatccaaggtcatctgccattctcgaactgccagcgcgcgctcataggggttaagaggggtgccccagggcatggggtgggtgagcgcggaggcatacatgccacagatatcgtagacatagaggggctcttcgaggatgccgatgtaagtgggataacagcgcccccctctgatgcttgctcgcacatagtcatagagttcatgtgagggggcgagaagacccgggcccagattggtgcggttgggtttttccgccctgtaaacgatctggcgaaagatggcatgggaattggaagagatagtaggtctctggaatatgttaaaatgggcatgaggtaggcctacagagtcccttatgaagtgggcatatgactcttgcagcttggctaccagctcggcggtgacgagtacatccagggcacagtagtcgagagtttcctggatgatgtcataacgcggttggcttttcttttcccacagctcgcggttgagaaggtattcttcgcgatccttccagtactcttcgaggggaaacccgtctttttctgcacggtaagagcccaacatgtagaactgattgactgccttgtagggacagcatcccttctccactggaagagagtatgcttgggctgcattgcgcagcgaggtatgagtgagggcaaaagtgtccctgaccatgactttgaggaattgatacttgaagtcaatgtcatcacaggccccctgttcccagagttggaagtccacccgcttcttgtaggcggggttgggcaaagcgaaagtaacatcattgaagaggatcttgccggccctgggcatgaaatttcgggtgattttgaaaggctgagggacctctgctcggttattgataacctgagcggccaagacgatctcatcaaagccattgatgttgtgccccactatgtacagttctaagaatcgaggggtgcccctgacatgaggcagcttcttgagttcttcaaaagtgagatctgtagggtcagtgagagcatagtgttcgagggcccattcgtgcacgtgagggttcgctttgaggaaggaggaccagaggtccactgccagtgctgtttgtaactggtcccggtactgacgaaaatgctgcccgactgccatcttttctggggtgacgcaatagaaggtttgggggtcctgccgccagcgatcccacttgagtttcatggcgaggtcataggcgatgttgacgagccgctggtctccagagagtttcatgaccagcatgaaggggattagctgcttgccaaaggaccccatccaggtgtaggtttccacatcgtaggtgaggaagagcctttctgtgcgaggatgagagccaatcgggaagaactggatctcctgccaccagttggaggaatggctgttgatgtgatggaagtagaactccctgcgacgcgccgagcattcatgcttgtgcttgtacagacggccgcagtactcgcagcgattcacgggatgcacctcatgaatgagttgtacctgacttcctttgacgagaaatttcagtggaaaattgaggcctggcgtttgtacctcgcgctctactatgttgtctgcatcggcatgaccatcttctgtctcgatggtggtcatgctgacgagccctcgcgggaggcaagtccagacctcggcgcggcaggggcggagctcgaggacgagagcgcgcaggccggagctgtccagggtcctgagacgctgcggagtcaggttagtaggcagtgtcaggagattgacttgcatgatcttttcgagggcgtgagggaggttcagatggtacttgatctccacgggtccgttggtggagatgtcgatggcttgcagggttccgtgccccttgggtgctaccaccgtgcccttgtttttccttttgggcggcggtggctctgttgcttcttgcatgtttagaagcggtgtcgagggcgcgcaccgggcggcaggggcggttcgggacccggcggcatggctggcagtggtacgtcggcgccgcgcgcgggtaggttctggtactgtgctctgagaagactcgcatgcgcgacgacgcggcggttgacatcctggatctgacgcctctgggtgaaagctaccggccccgtgagcttgaacctgaaagagagttcaacagaatcaatctcggtatcgttgacggcggcttgcctaaggatttcttgcacgtcgccagagttgtcctggtaggcgatctcggccatgaactgctcgatctcttcctcttgaagatctccgcggcccgctctctcgacggtggccgccaggtcgttggagatgcgcccaatgagttgagagaatgcattcatgcccgcctcgttccagacgcggctgtagaccacagcccccacgggatctctcgcgcgcatgaccacctgggcgaggttgagctccacgtggcgggtgaagaccgcatagttgcatagacgctggaaaaggtagttgagtgtggtggcgatgtgctcggtgacgaagaaatacatgatccatcgtctcagcggcatctcgctgacatcgcccagcgcttccaagcgctccatggcctcgtagaagtccacggcaaagttgaaaaactgggagttacgcgcggacacggtcaactcctcttccagaagacggatgagttcggcgacggtggtgcgcacctcgcgctcgaaagcccctgggatttcttcctcaatctcttcttcttccactaacatctcttcctcttcaggtggggctgcaggaggagggggaacgcggcgacgccggcggcgcacgggcagacggtcgatgaatctttcaatgacctctccgcggcggcggcgcatggtctcggtgacggcacgaccgttctccctgggtctcagagtgaagacgcctccgcgcatctccctgaagtggtgactgggaggctctccgttgggcagggacaccgcgctgattatgcattttatcaattgccccgtaggtactccgcgcaaggacctgatcgtctcaagatccacgggatctgaaaacctttcgacgaaagcgtctaaccagtcgcaatcgcaaggtaggctgagcactgtttcttgcgggcgggggcggctagacgctcggtcggggttctctctttcttctccttcctcctctttggagggtgagacgatgctgctggtgatgaaattaaaataggcagttttgagacggcggatggtggcgaggagcaccaggtctttgggtccggcttgttggatgcgcaggcgatgggccattccccaagcattatcctgacatctggccagatctttatagtagtcttgcatgagtcgttccacgggcacttcttcttcgcccgctctgccatgcatgcgagtgatcccgaacccgcgcatgggctggacaagtgccaggtccgctacaaccctttctgcgaggatggcttgctgcacctgggtgagggtggcttggaagtcgtcaaagtccacgaagcggtggtaagccccggtgttgattgtgtaggagcagttggccatgactgaccagttgactgtctggtgccccggacgcacaatctcggtgtacttgaggcgcgagtaggcgcgggtgtcaaagatgtaatcgttacaggtgcgcaccaggtactggtagccgataagaaagtgcggcggcggctggcggtataggggccatcgctctgtagccggggcgccaggggcgaggtcttccagcatgaggcggtgataaccgtagatgtacctggacatccaggtgataccggaggcggtggtggatgcccgcgggaactcgcgtacgcggttccagatgttgcgcagcggcatgaagtagttcatggtaggcacggtttggcccgtgagacgtgcacagtcgttgatgctctagacatacgggcaaaaacgaaagcggtcagcggctcgtctccgtggcctggaggctaagcgaacgggttgggctgcgcgtgtaccccggttcgaatctcggatcaggctggagccgcagctaacgtggtactggcactcccgtctcgacccaggcctgcacaaaacctccaggatacggaggcgggtcgtttttttttttttttgctttttcctggatgggagccagtgctgcgtcaagctttagaacactcagttctcggggctgggagtggctcgcgcccgtagtctggagaatcaatcgccagggttgcgttgcggtgtgccccggttcgagtcttagcgcgccggatcggccggtttccgcgacaagcgagggtttggcagccccgtcatttctaagaccccgccagccgacttctccagtttacgggagcgagccctctttttttgtttttttgttgcccagatgcatcccgtgctgcgacagatgcgcccccagcaacagcccccttctcagcagcagctacaacaacagccacaaaaggctcttcctgctcctgtaactactgcggctgcagccgtcagcggcgcggggcagcccgcctatgatctggacttggaagagggcgagggactggcgcgcctgggcgcaccatcgcccgagcggcacccgcgggtgcaactgaaaaaggactctcgcgaggcgtacgtgccccagcagaacctgttcagggacaggagcggcgaggagcctgaggaaatgcgagcttcccgctttaacgcgggtcgcgaactgcgtcacggtctggaccgaagacgggtgctgcgtgatgatgattttgaagtcgatgaagtgacaggaataagtcctgctagggcacatgtggccgcggccaacctagtatcagcttacgagcagaccgtgaaggaggagcgcaactttcaaaaatctttcaacaaccatgtgcgcaccctgattgcccgcgaggaagtgacactgggactgatgcacctgtgggacctgatggaagccattacccagaaccccaccagcaaacctctaaccgctcagctgtttctggtggtgcaacatagtagagacaatgaggcatttagggaggcgctgttgaacattactgagcccgaggggagatggttgtatgatcttatcaatattctgcaaagtataatagtgcaagaacgtagcctgggtctagctgagaaggtggctgctattaactactcggtcttgagcctgggcaagcactacgctcgcaagatctacaaaaccccatacgtacctatagacaaggaggtgaagatagatgggttttatatgcgcatgactctcaaggtgctgaccttgagtgacgatctgggagtgtaccgcaacgacaggatgcaccgcgcagtgagcgccagcagaaggcgtgagctgagcgacagagaacttatgcacagcttgcaaagagctctgactggggctggaaccgagggggagaactactttgacatgggagcggacttgcaatggcagcccagtcgcagggccctggacgcagcagggtatgagcttccttacatagaagaggtggatgaaggccaggatgaggagggcgagtacctggaagactgatggcgcgaccatccatatttttgctagatggaacagcaggcaccggaccccgcaaaacgggcggcgctacagagccagccgtccggcattaactcctcggacgattggagccaggccatgcaacgcatcatggcgctgacgacccgcaaccccgaagcctttaggcagcaaccccaggccaaccgcctttctgctatcctggaggccgtagtgccctcccgctccaaccccacacacgagaaggtcctggccatcgtgaacgcgctggtggagaacaaagccatacgtcccgatgaggctgggctggtatacaatgccctattggagcgcgtagcccgctacaacagcagcaacgtgcagaccaacctggaccggatggtgaccgatgtgcgcgaggccgtgtctcagcgcgagcggttccagcgagacgccaatttagggtcgctggtggctttgaacgccttcctcagcactcagcctgccaacgtgcctcgcggtcagcaagactacacaaactttctaagtgcattgagactcatggtggccgaagtccctcaaagcgaagtgtaccagtccgggccagactactttttccagaccagcagacagggcttgcagacagtgaacctgagccaggcttttaagaacctgaatggtctgtggggagtgcgcgccccagtgggagatcgggcgaccgtgtctagcttgctgacccccaactcccgcctactactgctcttggtagccccattcactgacagcggtagcatcgaccgtaattcgtacttgggctatctgttgaacctgtatcgcgaggccatagggcaaactcaggtagatgagcaaacctatcaagaaattacccaagtgagccgcgctctgggtcgggaggacactggcagcttggaagccaccttaaacttcttgctgaccaaccggtcgcagaagatccctcctcagtatgcgcttaccgcggaggaggaacggatcctgagatacgtgcagcagagcgtgggactgttcctaatgcaggagggggcgactcctactgctgcgctcgatatgacagcccgaaacatggagcccagcatgtatgccagtaaccggccttttatcaataaactgctagactacttacacagggcggctgctatgaactctgattatttcaccaatgctatcctgaacccccattggctgcccccacctgggttctatacgggcgagtatgacattgcccgacccaatgacgggtttttatgggacgatgtggacagtagtgttttctccccgcctcctggttataacacttggaagaaggaaggtggcgatagaaggcactcttccgtgtcactgtccggggcaacgggtgctgccgcagcggctcccgaggccgcaagtcctttccctagtttgccattttcgctaaacagtgtacgcagcagtgagctgggaagaataacccgtcctcgcttgatcggcgaggaggagtatttgaacgactccctgttgagacccgagagggagaagaatttccccaacaacgggatagaaagcttggttgacaaaatgaaccgctggaagacgtacgcgcacgatccccgggcgctgggggatagccggggcagcgctacccgtaaacgccagtggcacgacaggcagcggggcctggtgtgggccgatgatgattccgccgacgacagcagcgtgttggacttgggtgggagtggtggtaacccgttcgctcacctgcgcccccgcgtcgggcgcctgatgtaagaaaccgaaaataaatactcaccaaggccatggcgaccagcgtgcgttcgtttcttctctgttatatctagtatgatgaggcgaaccgtgctaggcggagcggtggtgtatccggagggtcctcctccttcgtacgagagcgtgatgcagcaggcggcggcggcgacgatgcagccaccactggaggctccctttgtaccccctcggtacctggcacctacggaggggagaaacagcattcgttactcggagctggcaccattgtatgataccacccggttgtatttggtggacaacaagtccgcggacatcgcctcactgaactatcagaacgaccacagcaacttcctcaccacggtggtgcaaaacaatgactttacccccacggaggccagcacccagaccatcaactttgacgagcggtcgcgatggggcggtcagctgaagactatcatgcacaccaacatgcccaacgtgaacgagtacatgtttagcaacaagttcaaagctcgggtgatggtgtctagaaaggctcctgaaggtgtcacagtagatgacaattatgatcacaagcaggatattttggaatatgagtggtttgagtttactctaccggaagggaatttctcagccacaatgaccattgacctaatgaacaatgccatcattgataattaccttgaagtgggcagacagaatggagtgttagagagtgacattggtgttaaatttgacaccaggaactttagactgggttgggatccggaaactaagttgattatgcctggggtttacacctatgaggcattccatcctgacattgtattgttgcctggttgcggagttgactttactgaaagtcgccttagtaacttgcttggtatcaggaaaagacacccattccaggagggttttaagatcttgtatgaggatcttgaagggggtaatatcccggccctgttggatgtagaagcctatgagaacagtaagaaagaacaagaagccaaaacagaagccgctaaagctgctgctattgctaaagccaacatagttgtcagcgaccctgtaagggtggctaatgcagaagaagtcagaggagacaactatacagcttcatctgttgcaactgacgaatcgctattggctgctgtggccgaaactacagagacaaaactcactattaaacctgtagaaaaagacagcaagagtagaagttacaatgtcttggaagataaagtgaatacagcctaccgcagctggtacctgtcctacaactatggtgaccctgaaaaaggagtccgttcctggacactgctcaccacctcggatgtcacctgtggagcagagcaggtgtactggtcgctcccagacatgatgcaggaccctgtcacattccgttccacgagacaagtcagcaactatccagtggtaggtgcagagctcatgccggtcttctcaaagagtttctacaacgagcaagccgtgtactcccagcagcttcgccagtccacctcgctcacgcacgtcttcaaccgcttccctgagaaccagatcctcatccgcccgccagcgcccaccattaccaccgtcagtgaaaacgttcctgctctcacagatcacgggaccctgccgttgcgcagcagtatccggggagtccagcgcgtgaccgttactgacgccagacgccgcacctgcccctacgtctacaaggccctgggcatagtcgcgccgcgcgtcctttcaagccgcactttctaaaaaaaaaaatgtccattcttatctcacctagtaataacaccggttggggcctgcgcgcgccaagcaagatgtacggaggtgctcgcaaacgctctacacagcaccctgtgcgcgtgcgcgggcacttccgcgctccatggggcgccctcaagggtcgtgcccgcactagaaccaccgtcgatgatgtgatcgaccaggtggtggccgatgctcgtaattatactcctactgcacctacatctactgtggatgcagttattgacagcgtagtggctgacgcccgcgcctatgctcgccggaagagcaggcggagacgcatcgccaggcgccaccgggctactcccgctatgcgagcggcaagagctctgctacggagggccaaacgcgtggggcgaagagctatgcttagagcggccagacgcgcggcttcaggtgccagtgccggcaggtcccgcaggcgcgcagccacggcggcagcagcggccattgccaacatggcccaaccgcgaagaggcaatgtgtactgggtgcgcgacgccaccaccggccagcgcgtgcccgtgcgcacccgcccccctcgctcttagaagatactgagcagtctccgatgttgtgtcccagcgaggatgtccaagcgcaaatacaaggaagagatgctccaggtcatcgcgcctgaaatctacggtccgccggtgaaggatgaaaaaaagccccgcaaaatcaagcgggtcaaaaaggacaaaaaggaagaagatggcaatgatggtctggcggagtttgtacgcgagttcgccccaaggcggcgtgtgcagtggcgtggacgcaaagtgcggcctgtgctgagacctggaaccacggtggtctttacgcccggcgagcgctccagcactgcttttaagcggtcctatgatgaggtgtatggggatgatgatattctggagcaggcggccgaccgcctgggcgagtttgcttatggcaagcgctcccgctcgagccccaaggaggaggcggtgtccattcccttggacaatgggaatcccacccctagtctcaagccagtcaccctgcagcaagtgctgcccgtgcctccacgcagaggcaacaagcgagagggtgaggatctgtatcccactatgcaattgatggtgcccaagcgccagcggctggaggacgtgctggagaaaatgaaagtggatcccgatatacaacctgaggtcaaagtgagacccatcaagcaggtggcgccaggtttgggagtacaaaccgtagacatcaagattcccaccgagtccatggaagtccaaaccgaacctgcaaagcccacaaccacctccattgaggtgcaaacggatccctggatgaccgcacccgttacaactccagctgctgtcaacaccactcgaagatcccggcgaaagtacggtccagcaagtttgctgatgccaaattatgctctgcacccatccattattccaactccgggttaccgaggcactcgctactaccgcagcaggagcagcacttcccgccgtcgccgcaaaacacctgcaagtcgtagtcaccgtcgtcgccgccgccccaccagcaatctgactcccgctgctctggtgcggagagtgtatcgcgatggccgcgcggatcccctgacgttgccgcgcgtacgctaccatccaagcatcacaacttaacaactgttgccgctgcctccttgcagatatggccctcacttgccgccttcgtgtccccattactggctaccgaggaagaaactcgcgccgtagaagagggatgttggggcgcggaatgcgacgccacaggcggcggcgcgctatcagcaagaggctggggggtggctttctgcctgctctgatccccatcatagccgcggcgatcggggcgataccaggcatagcttccgtggcggttcaggcctcgcagcgccactgacattggaaaaacttataaataaaacagaatggactctgatgctcctggtcctgtgactatgtttttgtagagatggaagacatcaatttttcatccctggctccgcgacacggcacgaggccgtacatgggcacctggagcgacatcggcaccagccaactgaacgggggcgccttcaattggagcagtatctggagcgggcttaaaaattttggctctaccataaaaacctatgggaacaaagcttggaacagcagcacagggcaggcattgagaaataagcttaaagagcaaaacttccaacagaaggtggttgatggaatcgcctctggtatcaatggggtggtggatctggccaaccaggccgtgcagaaacagataaacagccgcattgacccgccgccgtcagccccgggtgaaatggaagtggaggaagatctccctccccttgaaaagcggggcgacaagcgtccgcgccccgatctggaggagacactagtcacacgctcagacgacccgccctcctacgaggaggcagtgaagcttggaatgcccaccaccagacctgtagcccccatggctaccggggtaatgaaaccttctcagtcacaccgacccgctaccttggacttgcctccccctgctgttgcagcgcctgctcgcaagcctgtcgctaccccgaagcccaccaccgtacagcccgtcgccgtagccagaccgcgtcctgggggcactccacgtccgaatgcaaactggcagagtactctgaacagcatcgtgggtctgggcgtgcaaagtgtaaagcgccgtcgctgcttttaaattaatatggagtagcgcttaacttgcctgtctgtgtgtatgtgtcatcatcacgccgccgccgcagcaacagcagaggagcaaggaagaggtcgcgcgccgaggctgagttgatttcaagatggccaccccatcgatgctgccccagtgggcatacatgcacatcgccggacaggatgcttcggagtacctgagtccgggtctggtgcagttcgcccgcgccacagacacctacttcaatctggggaacaagtttaggaaccccaccgtggcgcccacccatgatgtgaccaccgaccgcagtcagcggctgatgctgcgctttgtgcccgttgaccgggaagacaatacctacgcatacaaagttcgatacaccttggctgtgggcgacaacagagtgctggatatggccagcactttctttgacattcggggtgtgttggatagaggccctagcttcaagccatactctggcactgcttacaactcgttggcccctaagggcgctcccaatacatctcagtggattgctgaaggcgtaaaaaaagaagatgggggatctgacgaagaggaagagaaaaatctcaccacttacacttttggaaatgccccagtgaaagcagaaggtggtgatatcactaaagacaaaggtcttccaattggttcagaaattacagacggcgaagccaaaccaatttatgcagataaactataccaaccagaacctcaggtgggagatgaaacttggactgacacagatggaacaactgagaagtatggtggtagagctctaaagccagaaactaaaatgaaaccctgctatgggtcttttgctaaacccactaacgtcaaaggcggacaggcaaaacaaaaaactactgaacaaccgcaaaaccagcaggttgaatatgatattgacatgaacttttttgatgaagcgtcacagaaagcaaacttcagtccaaaaattgtgatgtatgcagaaaatgtagacttggaaaccccagacactcatgtggtgtacaaacctggtacttcagaagaaagttctcatgctaatctgggtcaacaatctatgcccaacagacccaactacattggctttagagataactttattggacttatgtactacaacagtactggcaacatgggagtgctggcaggtcaagcatcccaattgaatgcggtggttgacttgcaggacagaaacacagaactatcatatcaactactgcttgactctctgggtgacagaaccagatacttcagcatgtggaatcaagcagtcgatagctatgatcctgatgtgcgcattattgaaaatcatggggtggaagatgagcttcccaactactgctttccattggatggagtaggggtaccaataagtagttacaaaataattgaaccaaacggacagggtgcagattggaaagagcctgacataaatggaacaagtgaaattggacaaggaaatctctttgccatggaaattaacctccaagctaatctctggagaagttttctttattccaatgtggctctgtatctcccagactcctacaaatacaccccagccaatgtcactcttccaactaacaccaacacttatgactacatgaatgggcgggtggttcccccatccctggtggatacctacgtaaacattggcgccagatggtctttggatgccatggacaatgtcaacccctttaaccatcaccgcaacgctggcctgcgataccggtccatgcttttgggcaatggtcgttacgtgcctttccacattcaagtgcctcagaaattctttgctgtgaagaacctgctgcttctacccggttcttacacctacgagtggaacttcagaaaggatgtgaacatggtcctgcagagttcccttggtaatgatctccgggtcgatggtgccagcataagttttaccagcatcaatctctatgccaccttcttccccatggcccacaacactgcctccacccttgaagccatgctgcgcaatgacaccaatgatcaatcattcaatgactacctttctgctgccaacatgctctaccccatcccggccaacgctaccaacgttcccatctccattccctctcgcaactgggccgccttcagaggctggtccttcaccagactcaaaaccaaggagactccctctttgggatcagggttcgatccctactttgtttactctggttctataccctacctggatggtaccttctaccttaaccacactttcaagaaagtctccatcatgtttgactcttcagtgagctggcctggtaatgacagattgctaagtccaaatgagttcgaaatcaagcgcacagttgatggggaaggctacaatgtggcccaatgtaacatgaccaaagactggttcctggtccagatgcttgccaactacaacattggataccagggcttctacgttcctgagggttacaaggatcgcatgtactccttcttcagaaacttccagcccatgagtagacaggtggttgatgagattaactacaaagactataaagctgtcgccgtaccctaccagcataataactctggctttgtgggttacatggctcctaccatgcgtcagggtcaagcgtaccctgctaactacccataccccctaattggaaccactgcagtaaccagtgtcacccagaaaaaattcctgtgcgacaggaccatgtggcgcatcccattctctagcaacttcatgtccatgggtgcccttacagacctgggacagaacttgctgtatgccaactcggcccatgcgctggacatgacttttgaggtggatcccatggatgagcccaccctgctttatcttcttttcgaagtcttcgacgtggtcagagtgcaccagccacaccgcggcgtcatcgaggccgtctacctgcgcacaccgttctcggccggcaacgccaccacataagaagcctcttgcttcttgcaagcagcagctgcagccatgtcatgcgggtccggaaacggctccagcgagcaagagctcaaagccatcgtccgagacctgggctgcggaccctatttcctgggaacctttgacaagcgtttcccggggttcatggcccccgacaagctcgcctgcgccatagtcaacactgccggacgcgagacggggggagagcactggctggcttttggttggaacccgcgctccaacacctgctacctttttgatccttttgggttctcggatgagcgactcaaacagatttaccagtttgagtacgaggggctcctgcgccgcagtgcccttgctaccaaagaccgctgcatcaccctggaaaagtccacccagagcgtgcagggcccgcgctcagccgcctgtggacttttttgctgtatgttccttcatgcctttgtgcactggcccgaccgccccatgaacggaaaccccaccatgaagttgctgactggggtgtcaaacagcatgctccaatcaccccaagtccagcccaccctgcgtcgcaaccaggaggcgctatatcgcttcctaaacacccactcatcttactttcgttctcaccgcgcacgcatcgaaagggccaccgcgtttgaccgtatggatatgcaataagtcatgtaaaaccgtgttcaataaaaagcactttatttttacatgcactaaggctctggttttttgctcattcgttttcatcattcactcagaaatcaaatgggttctggcgtgagtcagagtgacccgtgggcagggagacgttgcggaactgtaacctgttctgccacttgaactcggggatcaccagcttgggaactggaatttcgggaaaggtgtcttgccacaactttctggtcagttgcagggcgccaagcaggtcaggagcagagatcttgaaatcacagttggggccggcattctggacacgggagttgcggtacactgggttgcaacactggaacaccatcaaggctgggtgtctcacgcttgccagcacggtcgggtcactgatggtagtcacatccaagtcttcagcattggccattccaaagggggtcatcttacaggtctgcctgcccatcacgggagcgcagcctggcttgtggttgcaatcgcaatgaatggggatcagcatcatcctggcttggtcgggggttatccctgggtacacggccttcatgaaggcttcgtactgcttgaaagcttcctgagccttacttccctcggtgtaaaacatcccacaggacttgctggaaaattggttagtagcacagttggcatcattcacacagcagcgggcatcgttgttggccaactggaccacatttctgccccagcggttctgggtgatcttggctctgtctgggttctccttcatagcgcgctgcccgttttcgctcgccacatccatctcgataatgtggtccttctggatcataatagtgccatgcaggcatttcaccttgccttcgtaatcggtgcatccatgagcccacagagcgcacccggtgcactcccaattattgtgggcgatctcagaataagaatgcaccaatccctgcatgaatcttcccatcatcgctgtcagggtcttcatgctactaaatgtcagcgggatgccacggtgctcctcgttcacatactggtggcagatacgcttgtactgctcgtgctgctctggcatcagcttgaaagaggttctcaggtcattatccagcctatacctctccattagcacagccatcacttccatgcccttctcccaggcagataccaggggcaagctcaaaggattcctaacagcaatagaagtagctcctttagctatagggtcattcttgtcgatcttctcaacacttctcttgccatccttctcaatgatgcgcaccggggggtagctgaagcccacggccaccaactgagcctgttctctttcttcttcgctgtcctggctgatgtcttgcagagggacatgcttggtcttcctgggcttcttcttgggagggatcgggggaggactgttgctccgttccggagacagggatgaccgcgaagtttcgcttaccagtaccacctggctctcgatagaagaatcggaccccacgcgacggtaggtgttcctcttcgggggcagaggtggaggcgactgagatgggctgcggtccggccttggaggcggatggctggcagagcccattccgcgttcgggggtgtgctcccgttggcggtcgcttgactgatttcctccgcggctggccattgtgttctcctaggcagagaaacaacagacatggaaactcagccatcactgccaacatcgctgcaagcgccatcacacctcgcccccagcagcgacgaggaggagagcttaaccaccccaccacccagtcccgctaccaccacctctaccctcgatgatgaggaggaggtcgacgcagcccaggagatgcaggcgcaggataatgtgaaagcggaagagattgaggcagatgtcgagcaggacccgggctatgtgacaccggcggagcacgaggaggagctgaaacgttttctagacagagaggatgacgaccgcccagagcatcaccaggaggctggcctcggggatcatgttgccgactacctctccgggcttgggggggaggacgtgctcctcaaacatctagcaaggcagtcgatcatagttaaagacgcactactcaacctcaccgaagtgcccatcagtgtggaagagcttagccgcgcctacgagctgaacctcttttcgcctcagataccccccaagcggcagcgaaacggcacctgcgaggccaaccctcgactcaacttctatccagcttttactgtccccgaagtgctggccacctaccacatcttttttaagaaccaaaagattccagtctcctgccgcgccaaccgcacccgcgcagatgcccttctcaacttgggtccgggagctcgtttacctgatatagcttccttggaagaggttccaaagatctttgagggtctgggaagtgatgagactcgggccgcaaatgctctgcaacagggagagaatggcatggatgaacatcacagcgctctagtggaactggagggtgacaatgcccggcttgcagtgctcaagcgcagtatcgtggtcacccattttgcctaccccgctgttaacctgccgcccaaagtcatgagcgctgtcatggaccatctgctcatcaaacgagcaagtccactttcagaaaaccagaacatgcaggatccagacgcctcggacgagggcaagccggtagtcagtgacgagcagctatctcgctggctgggtaccaactccccccgagatttggaagaaagacgcaagcttatgatggctgtagtgctagtaactgttgagttggagtgtctgcgccgcttttttaccgaccccgagaccctgcgcaagctagaggagaacctgcactacaccttcagacatggcttcgtgcgccaggcatgcaagatctccaacgtggagctcaccaacctggtttcatacatgggcattttgcatgagaaccggctagggcagagcgttctgcacaccaccctgaagggggaggcccgccgcgactacatccgagactgtgtctacctctacctctgccatacctggcagactggtatgggtgtgtggcaacagtgtttggaagagcagaaccttaaagagctggacaagctcttgcagagatccctcaaagccctgtggacaggttttgacgagcgcaccgtcgcctcggacctggcggacatcatcttccccgagcgtcttagggttactctgcgaaacggcctgccagacttcatgagccagagcatgcttaacaactttcgctctttcatcctggaacgctccggtatcctgcctgccacctgctgtgcgctgccctccgactttgtgcctctcacctaccgcgagtgcccaccgccgctatggagccactgctacctattccgcctggccaactacctctcctaccactcggatgtgatagaggatgtgagcggagacggcctgctggaatgccactgccgatgcaatttatgcacaccccaccgctccctcgcctgcaacccccagttgctaagcgagacccagatcatcggcaccttcgagttgcagggtcccaacagtgaaggcgaggggtcttctccggggcagagtctgaaactgacaccggggctgtggacctccgcctacctgcgcaagttttatcccgaggactatcatccctatgagatcaggttctatgaggaccagtcacatcctcccaaagtcgagctctcagcctgcgtcatcacccagggggcaattctggcccaattgcaagccatccaaaaatcccgccaagaatttctgctgaaaaagggaagcggggtctaccttgacccccagaccggtgaggagctcaacacaaggttcccccaggatgtcccatcgccgaggaagcaagaagctgaaggtgcagctgtcacccccagaggatatggaggaagactgggacagtcaggcagaggaggagatggaagattgggacagccaggcagaggaggtggacagcctggaggaagacagtttggaggaggaagacgaggaggcagaggaggtggaagaagcaaccgccgccaaacagttgtcatcggcggcggagacaagcaagtccccagacagcagcacggctaccatctccgctccgggtcggggggcccagcggcggcccaacagtagatgggacgagaccgggcgatttccaaacccgaccaccgcttccaagaccggtaagaaggagcgacagggatacaagtcctggcgtggacataaaaacgctatcatctcctgcttgcatgaatgcgggggcaacatatccttcacccggcgatacctgcttttccaccacggtgtgaacttcccccgcaatatcttgcattactaccgtcacctccacagcccctactgcagtcagcaagtcccggcaaccccgacagaaaaagacagcagcgacaacggtgaccagaaaaccagcagttagaaaatccacaacaagtgcagcaggaggaggactgaggatcacagcgaacgagccagcgcagaccagagagctgaggaaccggatctttccaaccctctatgccatcttccagcagagtcgggggcaagagcaggaattgaaagtaaaaaaccgatctctgcgctcgctcaccagaagttgtttgtatcacaagagcgaagaccaacttcagcgcactctcgaggacgccgaggctctcttcaacaagtactgcgcgctgactcttaaagagtagcccttgcccgcgctcattcgaaaacggcgggaatcacgtcacccttggcagctgtcctttgccctcgtcatgagtaaagacattcccacgccttacatgtggagctatcagccccaaatggggttggcagcaggtgcttcccaggactactccacccgcatgaattggcttagcgccgggccctcaatgatatcacgggttaatgatatacgagcttatcgaaaccagttactcctagaacagtcagctcttaccaccacaccccgccaacaccttaatccccgaaattggcccgccgccctggtgtaccaggaaaatcccgctcccaccaccgtactacttcctcgagacgcccaggccgaagttcagatgactaacgcaggtgtacagctggcgggcggttccgccctatgtcgtcaccggcctcaacagagtataaaacgcctggtgatcagaggccgaggtatccagctcaacgacgagtcggttagctcttcgcttggtctgcgaccagacggagtcttccagatcgccggctgtgggagatcttccttcactcctcgtcaggctgtgctgactttggagagttcgtcctcgcagccccgctcgggcggcatcggaactctccagtttgtggaggagtttactccctctgtctacttcaaccccttctccggctctcctggccagtacccggacgagttcataccgaacttcgacgcaatcagcgagtcagtggatggctatgattgatgtctaatggtggcgcggctgagctagctcgactgcgacacctagaccactgccgccgctttcgctgtttcgcccgggaactcaccgagttcatttacttcgaactctccgaggagcaccctcagggtccggcccacggagtgcggattaccatcgaagggggaatagactctcgcctgcatcgcatcttctcccagcggcccgtgctgattgagcgcgaccagggaaatacaaccatctccatctactgcatctgtaaccaccccggattgcatgaaagcctttgctgtcttgtttgtgctgagtttaataaaaactgagttaagaccctcctacggactaccgcttcttcaatcaggactttacaacaccaaccagatcttccagaagacccagacccttcctcctctgatccaggactctaactctaccttaccagcaccctccactactaaccttcccgaaactaacaagcttggatctcatctgcaacaccgcctttcacgaagccttctttctgccaatactaccactcccaaaaccggaggtgagctccgcggtcttcctactgacgacccctgggtggtagcgggttttgtaacgttaggattagttgcgggtgggcttgtgctaatcctttgctacctatacacaccttgctgtgcatatttagtcatattgtgctgttggtttaagaaatgggggccatactagtcgtgcttgctttactttcgcttttgggtctgggctctgctaatctcaatcctcttgatcacgatccatgtctagacttcgacccagaaaattgcacacttacttttgcacccgacacaagccgtctctgtggagttcttattaagtgcggatgggactgcaggtccgttgaaattacacataataacaaaacatggaacaatacattatccaccacatgggaaccaggagttcccgagtggtatactgtctctgtccgaggtcctgacggttccattcgcattagtaacaacactttcattttttctgaaatgtgcgatctggccatgtttatgagcaaacagtatgacctatggcctcctagcaaagagaacattgtggcattttccattgcttattgcttggtaacatgcatcatcactgctatcatttgtgtgtgcatacacttgcttatagttattcgccctagacaaagcaatgaggaaaaagagaaaatgccttaacctttttcctcataccttttctttacagcatggcttctgttacagctctaattattgccagcattgtcactgtcgctcacgggcaaacaattgtccatattaccttaggacataatcacactcttgtagggcccccaattacttcagaggttatttggaccaaacttggaagtgttgattattttgatataatttgcaacaaaactgaaccaatatttgtaatctgtaacagacaaaatctcacgttaattaatgttagcaaaatttataacggttactattatggttatgatagatccagtagtcaatataaaaattacttagttcgcataactcagcccaaatcaacagtgccaactatgacaataattaaaatggctaataaagcattagaaaattttacattaccaacaacgcccaatgaaaaaaacattccaaattcaatgattgcaattattgcggcggtggcattgggaatggcactaataataatatgcatgttcctatatgcttgttgctataaaaagtttcaacataaacaggatccactactaaattttaacatttaattttttatacagatgatttccactacaatttttatcattactagccttgcagctgtaacttatggccgttcacacctaactgtacctgttggctcaacatgtacactacaaggaccccaagaaggctatgtcacttggtggagaatatatgataatggagggttcgctagaccatgtgatcagcctggtacaaaattttcatgcaacggaagagacttgaccattattaacataacattaaatgagcaaggcttctattatggaaccaactataaaaatagtttagattacaacattattgtagtgccagccaccacttctgctccccgcaaatccactttctctagcagcagtgccaaagcaagcacaattcctaaaacagcttctgctatgttaaagcttcgaaaaatcgctttaagtaattccacagcagctcccaatacaattcctaaatcaacaattggcatcattactgccgtggtagtgggattaatgattatatttttgtgcataatgtactacgcctgctgctatagaaaacatgaacaaaaaggtgatgcattactaaattttgatattgtttcaatcaaatgccactaacactctcaatgtgcagactactttaaaacatgacatggaaaaccacactacctcctatgcatacacaaatattcagcctaaatacgctatgcaacttagaaatcaccatactaattgtaattggaattcttacactatctgttattctttattttatattctgccgtcaaatacccaatgttcatagaaattctaaaagacgtcccatctattctcctatgattagtcgtccccatatggctctgaatgaaatctaagatctttttttttcttttacagtatggtgaacatcaatcatgattcctagaaatttcttcttcaccatactcatctgtgctttcaatgtctgtgctactttcacagcagtagccactgcaagcccagactgtataggaccatttgcttcctatgcactttttgcctttgttacttgcatctgcgtgtgtagcatagtctgcctggttattaattttttccaactggtagactggatctttgtgcgaattgcctacctacgtcaccatcccgaataccgcaatcaaaatgttgcggcacttcttaggcttatttaaaaccatgcaggctatgctaccagttattttaattctgctactaccctgcattgccctaccttccaccgccactcgcgctacacctgaacaacttagaaaatgcaaatttcaacaaccatggtcatttcttgattgctaccatgaaaaatctgattttcccacatactggatagtgattgttggaataattaacatactttcatgtaccgttttctcaatcacaatataccccacatttaattttgggtggaattctcccaatgcactgggttacccacaagaactagatgaacatatcccactacaacacatacaacaaccactagcattggtagagtatgaaaatgagccacaaccttcactgcctcctgctattagttacttcaacctaaccggcggagatgactgaaatactcaccacctccaattccgccgaggatctgcttgatatggacggccgcgcctcagaacagcgactcgcccaactacgcatccgccagcagcaggaacgcgtgaccaaagagctcagagatgtcatccaaattcaccaatgcaaaaaaggcatattttgtttggtaaaacaagccaagatatcctacgagatcaccgctactgaccatcgcctttcttacgaacttggcccccaacgacaaaaatttacatgcatggtgggaatcaaccctatagttatcacccagcaaagtggagatactaagggttgcattcactgctcttgcgattccaccgagtgcacctacaccctgctgaagaccctatgcggcctaagagacctgctacccatgaattaaaaattaataaaaaattacttacttgaaatcagcaataaggtctctgttgaaattttttcccagcagcacctcgcttccctcttcccaactctggtattctaaaccccgttcagcggcatactttctccatactttaaatgggatgtcaaattttagctcctctcctgtacccacgatcttcatgtctttcttcccagatgaccaagagagtccggctcagtgattccttcaaccctgtctacccctatgaagatgaaagcacctcccaacacccctttataaacccagggtttatttccccaaatggctttacacaaagcccagacggagttcttactttaaattgtttaaccccactaacaaccacaggcgggcctttacagttaaaagtgggagggggacttatagtggatgacactgatgggaccttacaagaaaacatacgtgctacagcacccattactaaaaataatcattctgtagaactatccattggaaatggattagaaacacaaaacaataaactatgtgccaaattgggaaatgggttaaaatttaacaacggtgacatttgtataaaggatagtattaacaccttatggactggaataaagcctccacctaactgtcaaattgtggaaaacactgatacaaacgatggcaaacttactttagtattagtaaaaaacggagggcttgttaatggctacgtatctctagttggtgtatcagacactgtgaaccaaatgttcacacaaaagtcagcaaccatacaattaagattatatttcgactcttctggaaatctattaactgatgaatcaaacttaaaaattccacttaaaaataaatcttctacagcaaccagtgaagctgcaaccagcagcaaagcctttatgccaagtactacagcttatccctttaacaccactactagggatagtgaaaactatattcatggaatatgttactatatgactagttatgatagaagtctagttcccttaaacatttctataatgctaaacagccgtacgatttcttccaatgttgcctatgccatacaatttgaatggaatctaaatgcaaaagaatctccagaaagcaacatagctacgctgaccacatccccctttttcttttcttatattagagaagacgacaactaaaaaataaagtttaagtgtttttatttaaaaatcacaaaattcgagtagttattttgcctcccccttcccatttaacagaatacaccaatctctccccacgcacagctttaaacatttggataccattagagatagacatagttttagtttccacattccaaacagtttcagagcgagccaatctggggtcagtgatacataaaaatgcatcgggatagtcttttaaagcgctttcacagtccaactgctgcggatgcgactccggagtctggatcacagtcatctggaagaagaacgatgggaatcataatccgaaaacggaatcgggcgattgtgtctcatcaaacccacaagcagccgctgtctgcgtcgctccgtgcgactgctgtttatgggatcggggtctgcagtgtcctgaagcatgattttaatagcccttaacattaactttctggtgcgatgcgcgcagcaacgcattctgatttcacttagattactacagtatgtacagcacattatcacaatattgtttaataaaccataattaaaagcgctccagccaaaactcatatctgatacaatcgcccctgcatgaccatcataccaaattttaatataaattaaatgtcgttccctcaaaaacacactacccacatacatgatctcttttggcatgtgcatattaacaatctgtctgtaccatggacaacgttggttaatcatgcaacccaatataaccttccggaaccacactgccaacaccgctcccccagccatgcattgaagtgaaccctgctgattacaatgacaatgaagaacccaattctctcgaccatgaatcacttgagactgaaaaatatctatagtagcacaacaaagacataaatgcatgcatcttctcataatttttaactcatctggatttaaaaacatatcccaaggaatgggaaactcttgcaaaacagtaaagctggcagaacaaggaagaccacgaacacaacttacactatgcatagtcatagtatcacaatctggcaacagcgggtggtcttcagtcatagaagctcgggtttcattttcctcacatcgtggtaactgggctctggtgtaagggtgatgtctggcgcatgatgtcgagcgtgcgcgcaaccttgtcataatggagttgtttcctgacattctcgtattttgtatagcaaaatgcggccctggcacaacacactcttcttcgtcttctatcctgccgcttagtgtgttccgtctgataattcaagtacagccacactcttaagttggtcaaaagaatgctggcttcagttgtaatcaaaactccatcatatttaattgttctaaggaaatcatccacggtagcatatgcaaatcccaaccaagcaatgcaactggattgtgtttcaagcagcagaggagagggaagagacggaagaatcatgttaatttttattccaaacgatctcgcagtacttcaaattgtagatcgcgcagatggcatctatcgcccccactgtgttggtgaaaaagcacagctaaatcaaaagaaatgcgattttcaaggtgctcaacggtggcttccaacaaagcctccacgcgcacatccaaaaacaaaagaataccaaaagaaggagcattttctaactcctcaaacatcatattacattcctgcaccattcccagataattttcagctttccagccttgaattattcgtgtcagttcttgtggtaaatccaaaccacacattacaaacaggtcacggagggcgccctccaccaccattcttaaacacaccctcataatgacaaaatatcttgctcctgtgtcacctgtagcaaattaagaatggcatcatcaattgacatgcccttggctctaagttcttctctaagttctagttgtaaatactctctcatattatcaccaaactgcttagccaaaagccccccgggaacaatagcaggggacgctacagtgcagtacaagcgcagacctccccaattggctccagcaaaaacaagattagaataagcatactgggaaccaccagtaatatcatcaaagttgctggaaatataatcaggcagagtttcttgtaaaaattgaataaaagaaaaattttccaaagaaacattcaaaatctctgggatgcaaatgcaataggttaccgcgctgcgctccaacattgttagttttgaattagtctgcaaaataaaagaaacaagcgtcatatcatagtagcctgtcgaacaggtggataaatcagtctttccatcacaagacaagccacagggtctccagctcgaccctcgtaaaacctgtcatcgtgattaaacaacagcaccgaaagttcctcgcggtggccagcatgaataattcttgatgaagcatataatccagacatgttagcatcagttaaagagaaaaaacagccaacatagcctctgggtataattatgcttaatcttaagtatagcaaagccacccctcgcggatacaaagtaaaaggcacaggagaataaaaaatataattatttctctgccgctgttcaggcaacgtcgcccccggtccatctaaatacacatacaaagcctcatcagccatggcttaccagacaaagaacagcgggcgcacaaagcacaagctctaaagaagctctaaagacactctccaacctctccacaatatatacacaagccctaaactgacgtaatgggagtaaagtataaaaaatcccgccaagcccaacacacaccccgaaactgcgtcagcagggaaaaatacagtttcacttccgcattcccaacaagcgtaagttcctctttctcatggtacgtcacatccgattaacttgcaacgtcattttcccacggtcgcaccgccccttttagccgttcaccccgcagccaatcaccacacagcgcgcacttttttaaattacctcatttgcatattggcaccattccatctataaggtatattatatagatag

SEQ ID NO: 269 - DNA, 34775 bp, Human adenovirus
  misc_feature 1..34775: note = Human adenovirus 34, GenBank Accession No. AY737797
  source 1..34775: mol_type = genomic DNA
catcatcaataatataccttatagatggaatggtgccaatatgtaaatgaggtgattttaaaaattgtggggtgtgtggtgattggctgtggggttaacggctaaacggggcggcgcggccgtgggaaaatgacgttttgtgggggtggagtttttttgcaagttgtcgcgggaaatgtgacgcataaaaaggctttttttctcacggaactactgacttttcccacggtatttaacaggaaatgaggtagttttgaccggatgcaagtgaaaattgctgatttgcgcgcgaaaactgaatgaggaagtgtttttctgaataatgtggtatttatggcagggtggagtatttgttcagggccaggtagactttgacccattacgtggaggtttcgattaccgtgttttttacctgaatttccgcgtaccgtgtcaaagtcttctgtttttacgtaggtgtcagctgatcgctacggtatttatacctcagggtttgtgtcaagaggccactcttgagtgccagcgagaagagttttctcctctgcgccggcagtttaataataaaaaaatgagagatttgcgatttctgcctcaggaaataatttctgctgagactggaaatgaaatactggagcttgtggtgcacgccctgatgggagacgatccggagccacctgtgcagctttttgagcctcctacgcttcaggaactgtatgatttagaggtagagggatcggaggattctaatgaggaagctgtgaatggcttttttaccgattctatgcttttagctgctaatgaaggattagaattagatccgcctttggacactttcgatactccaggggtgattgtggaaagcggtacaggtgtaagaaaattacctgatttgggttccgtggactgtgatttgcactgctatgaagacgggtttcctccgagtgatgaggaggaccatgaaaaggagcagtctatgcagactgcagcgggtgagggagtgaaggctgccagtgttggttttcagttggattgcccggagcttcctggacatggctgtaagtcttgtgaatttcacaggaaaaatactggagtaaaggaactgttatgttcgctttgttatatgagagcgcactgccactttatttacagtaagtgtgtttaagttaaaatttaaaggaatatgctgtttttcacatgtatattgagtgggagttttgtgcttcttattataggtcctgtgtctgatgctgatgagtcaccatctcctgattctactacctcacctcctgagattcaagcacctgttcctgtggacgtgcgcaagcccattcctgtgaagcttaagcctgggaaacgtccagcagtggaaaaacttgaggacttgttacagggtggggacggacctttggacttgagtacacggaaacggccaagacaataagtgttccatatccgtgtttacttaaggtgacgtcaatatttgtgtgagagtgcaatgtaataaaaatatgttaactgttcactggtttttattgctttttgggcggggactcaggtatataagtagaagcagacctgtatggttagctcataggagctggctttcatccatggaggtttgggccattttggaagaccttagaaagactaggcaactgttagaggacgcttcggacggagtctccggtttttggagattctggttcgctagtgaattagctagggtagtttttaggataaaacaggactataaagaagaatttgaaaagttgttggtagattgcccaggactttttgaagctcttaatttgggccatcaagttcactttaaagaaaaagttttatcagttttagacttttcaaccccaggtagaactgccgctgctgtggcttttcttacttttatattagataaatggatcccgcagactcatttcagcaggggatacgttttggatttcgtagccacagcattgtggagaacatggaaggttcgcaagatgaggacaatcttaggttactggccagtgcagcctttgggtgtagcgggaatcctgaggcatccaccggtcatgccagcggttctggaggaggaacagcaagaggacaacccgagagccggcctggaccctccagtggaggaggcggagtagctgacttgtctcctgaactgcaacgggtgcttactggatctacgtccactggacgggataggggcgttaagagggagagggcatctagtggtactgatgctagatctgagttggctttaagtttaatgagtcgcagacgtcctgaaaccatttggtggcatgaggtccagaaagagggaagggatgaagtttctgtattgcaggagaaatattcactggaacaggtgaaaacatgttggttggagcctgaggatgattgggaggtggccattaaaaattatgccaagatagctttgaggcctgataaacagtataagattactagacggattaatatccggaatgcttgttacatatctggaaatggggctgaggtggtaatagatactcaagacaaggcagttattagatgctgcatgatggatatgtggcctggagtagtcggtatggaagcagtaacttttgtaaatgttaagtttaggggagatggttataatggaatagtgtttatggccaataccaaacttatattgcatggttgtagcttttttggtttcaacaatacctgtgtagatgcctggggacaggttagtgtacggggatgtagtttctatgcgtgttggattgccacagctggcagaaccaagagtcaattgtctctgaagaaatgcatattccaaagatgtaacctgggcattctgaatgaaggcgaagcaagggtccgccactgcgcttctacagatactggatgttttattttaattaagggcaatgccagcgtaaagcataacatgatttgcggtgcttccgatgagaggccttatcaaatgctcacttgtgccggtgggcattgtaatatgctggctactgtgcatattgtttcccatcaacgcaaaaaatggcctgtttttgatcacaatgtgttgaccaagtgtaccatgcatgcaggtgggcgtagaggaatgtttatgccttaccagtgtaacatgaatcatgtgaaagtgttgttggaaccagatgccttttccagaatgagcctaacaggaatctttgacatgaacatgcaaatctggaagatcctgaggtatgatgatacgagatcgagggtgcgcgcatgcgaatgcggaggcaagcatgccaggttccagccggtgtgtgtagatgtgactgaagatctgagaccggatcatttggttattgcccgcactggagcagagttcggatccagtggagaagaaactgactaaggtgagtattgggaaaacttggggtggggttttcagatggacagattgagtaaaaatttgttttttctgtctttcagctgtcatgagtggaaacgcttcttttaaggggggagtcttcagcccttatctgacagggcgtctcccatcctgggcaggagttcgtcagaatgttatgggatctactgtggatggaagacccgtccaacccgccaattcttcaacgctgacctatgctactttaagttcttcacctttggacgcagctgcagccgccgccgccgcctctgttgccgctaacactgtgcttggaatgggttactatggaagtatcgtggctaattccacttcctctaataacccttctaccctgactcaggacaagttacttgtccttttggcccagctggaggctttgacccaacgtctgggtgaactttatcagcaggtggccgagttgcgagtacaaactgagtctgctgtcggcacggcaaagtctaaataaaaaaaaattccacaatcaatgaataaataaacgagcttgttgttgatttaaaatcaagtgtttttatttcatttttcgcgcacggtatgccctagaccaccgatctcgatcattgagaacacggtggattttttccagaatcctatagaggtgggattgaatgtttagatacatgggcattaggccatctttggggtggagatagctccattgaagggattcatgctccggggtagtgttgtaaatcacccagtcataacaaggtcgcagtgcatggtgttgcacaatatcttttagaagtaggctgattgccacagataagcccttggtgtaggtgtttacaaaccggttgagctgggaggggtgcattcggggtgaaattatgtgcattttggattggatttttaagttggcaatattgccgccaagatctcgtcttgggttcatgttatgaaggaccaccaagacggtgtatccggtacatttaggaaatttatcgtgtagcttggatggaaaagcgtggaaaaatttggagacacccttgtgtcctccgagattttccatgcactcatccatgataatagcaatggggccgtgggcagcagcgcgggcaaacacgttccgtgggtctgacacatcatagttatgttcctgagttaaatcatcataagccattttaatgaatttggggcggagagtacccgattggggtatgaatgttccttcgggccccggagcatagttcccctcacagatttgcatttcccaagctttcagttccgatggtggaatcatgtccacctggggggctatgaagaacaccgtttctggggcgggggtgattagttgggatgatagcaagtttctgagcaattgagatttgccacatccggtggggccataaatgattccgattacaggttgcaggtggtagtttagggaacggcaactgccgtcttctcgaagcaagggggccacctcgttcatcatttcccttacatgcatattttcccgcaccaaatccattaggaggcgctctcctcctagtgatagaagttcttgtagtgaggaaaagtttttcagcggttttagaccgtcagccatgggcattttggagagagtttgctgcaaaagttctagtctgttccacagttcagtgatgtgttctatggcatctcgatccagcagacctcctcgtttcgcgggtttggacggctcctggagtagggtatgagacgatgggcgtccagcgctgccagggttcggtccttccagggtctcagtgttcgagtcagggttgtttccgtcacagtgaaggggtgtgcgcctgcttgggcgcttgccagggtgcgcttcagactcattctgctggtggagaacttctgtcgcttggcgccctgtatgtcggccaagtagcagtttaccatgagttcgtagttgagcgcctcggctgcgtggcctttggcgcggagcttacctttggaagttttcttgcataccgggcagtataggcatttcagcgcatacagcttgggcgcaaggaaaatggattctggggagtatgcatctgcgccgcaggaggcgcaaacagtttcacattccaccagccaggttaaatccggttcattggggtcaaaaacaagttttccgccatattttttgatgcgtttcttacctttggtctccatgagttcgtgtcctcgttgagtgacaaacaggctgtccgtatccccgtagactgattttacaggcctcttctccagtggagtgcctcggtcttcttcgtacaggaactctgaccactctgatacaaaggcgcgcgtccaggccagcacaaaggaggctatgtgggaggggtagcgatcgttgtcaaccagggggtccaccttttccaaagtatgcaaacacatgtcaccctcttcaacatccaggaatgtgattggcttgtaggtgtatttcacgtgacctggggtccccgctgggggggtataaaagggggcggttctttgctcttcctcactgtcttccggatcgctgtccaggaacgtcagctgttggggtaggtattccctctcgaaggcgggcatgacctctgcactcaggttgtcagtttctaagaacgaggaggatttgatattgacagtgccggttgagatgcctttcatgaggttttcgtccatttggtcagaaaacacaatttttttattgtcaagtttggtggcaaatgatccatacagggcgttggataaaagtttggcaatggatcgcatggtttggttcttttccttgtccgcgcgctctttggcagcgatgttgagttggacatactcgcgtgctaggcacttccattcggggaagatagttgtcaattcatctggcacgattctcacttgccaccctcgattatgcaaggtaattaaatccacactggtggccacctcgcctcgaaggggttcgttggtccaacagagcctacctcctttcctagaacagaaagggggaagtgggtctagcataagttcatcgggagggtctgcatccatggtaaagattcccggaagtaaatccttatcaaaatagctgatgggagtggggtcatctaaggccatttgccattctcgagctgccagtgcacgctcatatgggttaaggggactgccccagggcatgggatgggtgagtgcagaggcatacatgccacagatgtcatagacgtagatgggatcctcaaagatgcctatataggttggatagcatcgcccccctctgatacttgctcgcacatagtcatatagttcatgtgatggcgctagcaaccccggacccaagttggtgcgattgggtttttctgttctgtagacaatctggcgaaagatggcgtgagaattggaagagatggtgggtctttgaaaaatgttgaaatgggcatgaggtagacctacagagtctctgacaaagtgggcataagattcttgaagcttggttaccagttcggcggtgacaagtacgtctagggcgcagtagtcaagtgtttcttgaatgatgtcataacctggttggtttttcttttcccacagttcgcggttgagaaggtattcttcgcgatccttccagtactcttctagcggaaacccgtctttgtctgcacggtaagatcctagcatgtagaactgattaactgccttgtaagggcagcagcccttctctacgggtagagagtatgcttgagcagcttttcgcagcgaagcgtgagtaagggcgaaggtgtctctgaccatgactttgagaaattggtatttgaagtccatgtcgtcacaggctccctgttcccagagttggaagtctacccgtttcttgtaggcggggttgggcaaagcgaaagtaacatcgttgaagagaatcttaccggctctgggcataaaattgcgagtgatgcggaaaggctgtggtacttccgctcgattgttgatcacctgggcagctaggacgatctcgtcgaaaccgttgatgttgtgtcctacgatgtataattctatgaaacgcggcgtgcctttgacgtgaggtagcttattgagctcatcaaaggttaggtctgtagggtcagataaggcgtagtgttcgagagcccattcgtgcaggtgaggatttgcatgtaggaatgatgaccaaagatccaccgccagtgctgtttgtaactggtcccgatactgacgaaaatgctggccaattgccattttttctggagtgacacagtagaaggttctggggtcttgttgccatcgatcccactttagtttaatggctagatcgtgggccatgttgacgagacgctcttctcctgagagtttcatgaccagcatgaaaggaactagttgtttgccaaaggaccccatccaggtgtaagtttccacatcgtaggtcaggaagagtctttctgtgcgaggatgagagccgatcgggaagaactggatttcctgccaccagttggaggattggctgttgatgtgatggaagtagaagtttctgcggcgcgccgagcattcgtgtttgtgcttgtacagacggccgcagtagtcgcagcgttgcacgggttgtatctcgtgaatgagctgtacctggcttcccttgacgagaaatttcagtgggaagccgaggcctggcgattgtatctcgtgctcttctatattcgctgtatcggcctgttcatcttctgtttcggtggtggtcatgctgacgagcccccgcgggaggcaagtccagacctcggcgcgggaggggcggagctgaaggaccagagcgcgcaggctggagctgtccagagtcctgagacgctgcggactcaggttagtaggtagggacagaagattaacttgcatgatcttttccagggcgtgcgggaggttcagatggtacttgatttccacaggttcgtttgtagagatgtcaatggcttgcagggttccgtgtcctttgggcgccactaccgtacctttgttttttcttttgatcggtggtggctctcttgcttcttgcatgctcagaagcgatgacggggacgcgcgccgggcggaagcggttgttccggacccggaggcatggctggtagtggcacgtcggcgccgcgcacgggcaggttctggtactgcgctctgagaagacttgcgtgcgccaccacgcgtcgattgacgtcttgtatctgacgtctctgggtgaaagctaccggccccgtgagcttgaacctgaaagagagttcaacagaatcaatttcggtatcgttaacggcagcttgtctcagtatttcttgtacgtcaccagagttgtcctggtaggcgatctccgccatgaactgctcgatttcttcctcctgaagatctccgcgacccgctctctcgacggtggccgcgaggtcattggagatacggcccatgagttgggagaatgcagtcatgcccgcctcgttccagacgcggctgtaaaccacggccccctcggagtctcttgcgcgcatcaccacctgagcgaggttaagctccacgtgtctggtgaagaccgcatagttgcataggcgctgaaaaaggtagttgagtgtggtggcaatgtgttcggcgacgaagaaatacatgatccatcgtctcagcggcatttcgctgacatcgcccagagcttccaagcgctccatggcctcgtagaagtccacggcaaaattaaaaaactgggagtttcgcgcggacacggtcaattcctcctcgagaagacggatgagttcggctatggtggcccgtacttcgcgttcgaaggctcccgggatctcttcttcctcttctatctcttcttccactaacatctcttcttcgtcttcaggcgggggcggagggggcacacggcgacgtcgacggcgcacgggcaaacggtcgatgaatcgttcaatgacctctccgcggcggcggcgcatggtttcagtgacggcgcggccgttctcgcgcggtcgcagagtaaaaacaccgccgcgcatctccttaaagtggtgactgggaggttctccgtttgggagggagagggcgctgattatacattttattaattggcccgtagggactgcgcgcagagatctgatcgtgtcaagatccacgggatctgaaaacctttcgacgaaagcgtctaaccagtcacagtcacaaggtaggctgagtacggcttcttgtgggcgggggtggttatgtgttcggtctgggtcttctgtttcttcttcatctcgggaaggtgagacgatgctgctggtgatgaaattaaagtaggcagttctaagacggcggatggtggcgaggagcaccaggtctttgggtccggcttgctggatacgcaggcgattggccattccccaagcattatcctgacatctagcaagatctttgtagtagtcttgcatgagccgttctacgggcacttcttcctcacccgttctgccatgcatacgtgtgagtccaaacccgcgcattggttgtaccagtgccaagtcagctacgactctttcggcgaggatggcttgctgtacttgggtgagggtggcttgaaagtcatcaaaatccacaaagcggtggtaagccccggtattaatggtgtaagcacagttggccatgactgaccagttaactgtctggtgaccagggcgcacgagctcggtgtatttaaggcgcgaataggcgcgggtgtcaaagatgtaatcgttgcaggtgcgcaccagatactggtaacctataagaaaatgcggcggtggttggcggtagagaggccatcgttctgtagctggagcgccgggggcgaggtcttccaacataaggcggtgatagccgtagatgtacctggacatccaggtgattcctgcggcggtagtagaagcccgaggaaactcgcgtacgcggttccaaatgttgcgtagcggcatgaagtagttcattgtaggcacggtttgaccagtgaggcgcgcgcagtcattgatgctctatagacacggagaaaatgaaagcgttcagcgactcgactccgtagcctggaggaacgtgaacgggttgggtcgcggtgtaccccggttcgagacttgtactcgagccggccggagccgcggctaacgtggtattggcactcccgtctcgacccagcctacaaaaatccaggatacggaatcgagtcgttttgctggttgccgaatggcagggaagtgagtcctattttttttttttgccgctcagatgcatcccgtgctgcgacagatgcgtccccaacaacagcccccctcgcagcagcagcaaccacaaaaggctgtccctgcaactactgcaactgccgctgtgagcggtgcgggacagcccgcctatgatctggacttggaagagggcgaaggactggcacgtctaggtgcgccttcgcccgagcggcatccgcgagttcaactgaaaaaagattctcgcgaggcgtatgtgccccaacagaacctatttagagacagaagcggcgaggagccggaggagatgcgagcttcccgctttaacgcgggtcgtgagctgcgtcacggtttggacagaagacgagtgttgcgggacgaggatttcgaagttgatgaagtgacagggatcagtcctgccagggcacacgtggctgcagccaaccttgtatcggcttacgaacagacagtaaaggaagagcgtaatttccaaaagtcttttaataatcatgtgcgaaccctcattgcccgcgaagaagtcacccttggtttgatgcatttgtgggatttgatggaagctatcattcagaaccctactagcaaacctctgaccgcacagctgtttctggtggtgcaacacagcagagacaatgaggctttcagagaggcgctgctcaacatcaccgaacccgaggggagatggttgtatgatcttatcaacattctacagagtatcatagtgcaggagcggagcctgggcctggccgagaaggtggctgccatcaattactcggttttgagcttgggaaagtattacgctcgcaagatctacaagactccatacgttcccatagacaaggaggtgaagatagatgggttctacatgcgcatgacgctgaaggtgttgaccctgagcgatgatcttggggtgtaccgcaatgacagaatgcatcgcgcggtgagcgccagcaggaggcgcgagttaagcgacagggaactgatgcacagtttgcaaagagctctaactggagctggaaccgagggtgagaattactttgatatgggagctgacttgcagtggcagcctagtcgcagggctctgaacgccgcgacggcaggatgtgagcttccttacatagaagaggcggatgaaggcgaggaggaagagggcgagtacttggaagactgatggcacaacccgtgttttttgctagatggaacagcaagcaccggatcccgcaatgcgggcggcgctgcagagccagccgtccggcattaactcctcggacgattggacccaggccatgcaacgtatcatggcgttgacgactcgcaaccccgaagcctttagacagcaaccccaggccaaccgtctatcggccatcatggaagctgtagtgccttcccgctctaatcccactcatgagaaggtcctggccatcgtgaacgcgttggtggagaacaaagctattcgtccagatgaggccggactggtatacaacgctctcttagaacgcgtggctcgctacaacagtagcaatgtgcaaaccaatttggaccgtatgataacagatgtacgcgaagccgtgtctcagcgcgaaaggttccagcgcgatgccaacctgggttcgctggtggcgttaaatgctttcttgagtactcagcctgctaatgtgccgcgtggtcaacaggattatactaactttttaagtgctttgagactgatggtatcagaagtacctcagagcgaagtatatcagtccggtcctgattacttctttcagactagcagacagggcttgcagacggtaaatctgagccaagcttttaaaaaccttaaaggtttgtggggagtgcatgccccggtaggagaaagagcaaccgtgtctagcttgttaactccgaactcccgcctattattactgttggtagctcctttcaccgacagcggtagcatcgaccgtaattcctatttgggttacctactaaacctgtatcgcgaagccatagggcaaagtcaggtggacgagcagacctatcaagaaattacccaagtcagtcgcgctttgggacaggaagacactggcagtttggaagccactctgaacttcttgcttaccaatcggtctcaaaagatccctcctcaatatgctcttactgcggaggaggagaggatccttagatatgtgcagcagagcgtgggattgtttctgatgcaagagggggcaactccgactgcagcactggacatgacagcgcgaaatatggagcccagcatgtatgccagtaaccgacctttcattaacaaactgctggactacttgcacagagctgccgctatgaactctgattatttcaccaatgccatcttaaacccgcactggctgcccccacctggtttctacacgggcgaatatgacatgcccgaccctaatgacggatttctgtgggacgacgtggacagcgatgttttttcacctctttctgatcatcgcacgtggaaaaaggaaggcggcgatagaatgcattcttctgcatcgctgtccggggtcattggtgctaccgcggctgagcccgagtctgcaagtccttttcctagtctacccttttctctacacagtgtacgtagcagcgaagtgggtagaataagtcgcccgagtttaatgggcgaagaggagtacctaaacgattccttgctcagaccggcaagagaaaaaaatttcccaaacaatggaatagaaagtttggtggataaaatgagtagatggaagacttatgctcaggatcacagagacgagcctgggatcatggggactacaagtagagcgagccgtagacgccagcgccatgacagacagaggggtcttgtgtgggacgatgaggattcggccgatgatagcagcgtattggacttgggtgggagaggaaggggcaacccgtttgctcatttgcgccctcgcttgggtggtatgttgtaaaaaaaaataaaaaagaaaaaactcaccaaggccatggcgacgagcgtacgttcgttcttctttattatctgtgtctagtataatgaggcgagtcgtgctaggcggagcggtggtgtatccggagggtcctcctccttcgtacgagagcgtgatgcagcagcagcaggcgacggcggtgatgcaatccccactggaggctccctttgtgcctccgcgatacctggcacctacggagggcagaaacagcattcgttactcggaactggcacctcagtacgataccaccaggttgtatctggtggacaacaagtcggcggacattgcttctctgaactatcagaatgaccacagcaacttcttgaccacggtggtgcaaaacaatgactttacccctacggaagccagcacccagaccattaactttgatgaacgatcgcggtggggcggtcagctaaaaaccatcatgcatactaacatgcccaacgtgaacgagtatatgtttagtaacaagttcaaagcgcgtgtgatggtgtccagaaaacctcctgagggtgttagagtagacgataattatgatcataagcaagatattctaaaatacgagtggttcgagtttactttgccagaaggcaacttttcggtcactatgactatcgacttgatgaacaatgccatcatagacaattacttgaaagtgggcagacagaatggagtgttggaaagtgacattggtgttaagttcgacactaggaacttcaagttgggatgggatccagaaactaagttgatcatgcctggggtttacacctatgaggccttccatcctgacatcgtattgctgcctggctgcggagtggactttaccgaaagccgtctgagcaaccttcttggcattagaaagaaacacccattccaagagggttttaagatcttgtatgaggatttagaaggaggaaatattccagcccttttggatgtagatgcttatgagaacagcaagaaagatcaaaaagccaaaatagaagctgctgcagaagctaaagcaaacatagttgccaacgatccggtaagggtggctaacgctagtgaaatcaggggagacagttttgccgcaacatccgttccgactaaagaatcattattggatgatgtgtctcaaaacatagagttaaaactcactattaagcctgtggaaaaagatggcaaaaacagaagttacaatgtgttggaagataaaatcaacacggcctatcgcagttggtacctttcgtacaattatggcgaccccgaaaaaggagtgcgttcctggacattgctcaccacctcagatgtcacctgcggagcggagcaggtctactggtcgcttccagacatgatgcaggatcctgtcactttccgctccactagacaagtcagtaactaccctgtggtgggtgcagagcttatgcccgtcttttcaaagagcttctacaacgaacaagctgtgtactcccagcagctccgccagtccacctcgcttacgcacgtcttcaaccgctttcctgagaaccagattttaatccgtccgccggcgcccacaattaccaccgtcagtgaaaacgttcctgctctcacagatcacgggaccctgccgttgcgcagcagtatccggggagtccaacgtgtgaccgttactgacgccagacgccgcacctgtccctacgtgtacaaggcactgggcatagtcgcaccgcgcgtcctttcaagccgcactttctaaaaaaaaaaaaaaaatgtccgttcttatctcgcccagtaataacaccggttggggtctgcgcgctcccagcaagatgtacggaggcgcacgcaaacgttctacccaacatcccgtgcgtgttcgcgggcattttcgcgctccatggggtgccctcaagggccgcactcgcgttcgaaccaccgtcgatgatgtaatcgatcaggtggttgccgacgcccgtaattatactcctactgcgcctacatctactgtggacgcagttattgacagtgtagtggctgacgctcgcaactatgctcgacgtaagagccggcgaaggcgcattgccagacgtcaccgagctaccactgccatgcgagcagcaagagctctgctacgaagagctagacgcgtggggcgaagagccatgcttagggcggccagacgtgcagcttcgggcgccagcgccggcaggtcccgcaggcaagcagccgctgtcgcagcggcgactattgccgacatggcccaatcgcgaagaggcaatgtatactgggtgcgtgacgctgccaccggtcaacgtgtacccgtgcgcacccgtccccctcgcacttagaagatactgagcagtctccgatgttgtgtcccagcggcgaggatgtccaagcgcaaatacaaggaagaaatgctgcaggttatcgcacctgaagtctacggccaaccgttgaaggatgaaaaaaaaccccgcaaaatcaagcgggtaaaaaaggacaaaaaagaagaggaagatggcgatgatgggctggcggagtttgtgcgcgagtttgccccacggcgacgcgtgcaatggcgtgggcgcaaagttcgacatgtgttgagacctggaacttcggtggtctttacacccggcgagcgttcaagcgctacttttaagcgttcctatgatgaggtgtacggggatgatgatattcttgagcaggcagctgaccgattaggcgagtttgcttatggcaagcgtagtagaataaatcccaaggatgaaacagtgtccatacccttggatcatggaaatcccacccctagtcttaaaccggtcactttgcagcaagtgttacccgtaactccgcgaacaggtgttaaacgcgaaggtgaagatttgtatcccactatgcaactgatggtgcccaaacgccagaagttggaggacgttttggagaaagtaaaagtggatccagatattcaacctgaggttaaagtgagacccattaagcaggtagcgcctggtctgggagtacaaactgtagacattaaaattcccactgaaagtatggaagtgcaaactgaacccgcaaagcctactgccacctccactgaagtgcaaacggacccatggatgcccatgcctattacaactgacgccgtcggtcccactcgaagatcccgacgaaagtacggtccagcaagtctgttgatgcccaactatgtcgtacacccatctattattcctactcctggttaccgaggcactcgctactatcgcagccgaaacagtacttcccgccgtcgccgcaagacacctgcaaatcgcagtcgtcgccgtagacgcacaagcaaaccgattcccggcgccctggtgcggcaagtgtaccgcaatggtagtgcggaacctttgacactgccgcgtgcgcgttaccatcctagtatcatcacttaatcaatgttgccgctgcctccttgcagatatggccctcacttgtcgccttcgcgttcccatcactggttaccgaggaagaaactcgcgccgtagaagagggatgttggggcgcggaatgcgacgctacaggcgacggcgtgctatccgcaagcaattgcggggtggttttttgccagccttaattccaattatcgctgctgcgattggcgcaataccaggcatagcttccgtggcggttcaggcctcgcaacgacattgacattggaaaaaaaaaaaacgtataaataaaaaatacaatggactctgacactcctggtactgtgactatgttttcttagagatggaagacatcaatttttcatccttggctccgcgacacggcacgaagccgtacatgggcacctggagcgacatcggcacgagccaactgaacgggggcgccttcaattggagcagtatctggagcgggcttaaaaattttggctcaaccataaaaacatacgggaacaaagcttggaacagcagtacaggacaggcgcttagaaataaacttaaagaccagaacttccaacaaaaagtagtcgatgggatagcttccggtatcaatggagtggtagatttggctaaccaggctgtgcagaaaaagataaacagtcgtttggacccgccgccagcaaccccaggtgaaatgcaagtggaggaagaaattcctccgccagaaaaacgaggcgacaagcgtccgcgtcccgatttggaagagacgctggtgacgcgcgtagatgaaccgccttcttatgaggaagcaacgaagcttggaatgcccaccactagaccgatagcccctatggccaccggggtgatgaaaccttctcagttgcatcgacccgtcaccttggatttgccccctcctcctgctgctactgctgtacccgcttctaagcctgtcgctgccccgaaaccagtcgccgtagccaggtcacgtcccgggggcgctcctcgtccaaatgcacactggcaaaatactctgaacagcatcgtgggtctaggcgtgcaaagtgtaaaacgccgtcgctgcttttaattaaatatggagtagcgcttaacttgcctatctgtgtatatgtgtcattacacgccgtcacagcatcagaggaaaaaaggaagaggtcgtgcgtcgacgctgagttactttcaagatggccaccccatcgatgctgccccaatgggcatacatgcacatcgccggacaggatgcttcggagtacctgagtccgggtctggtgcagttcgcccgcgccacagacacctacttcaatctgggaaataagtttagaaatcctaccgtagcgccgacccacgatgtgaccaccgatcgtagccagcggctcatgttgcgcttcgtgcccgttgaccgggaggacaatacatactcttacaaagtgcggtacaccctggccgtgggcgacaacagagtgctggatatggccagcacgttctttgacattaggggcgtgttggacagaggtcccagttttaaaccctattctggtacggcttacaactccctggctcctaaaggcgctccaaatgcatctcagtggttggataagggagttacaagcactggcctagtggacgacggcaatactgatgatggggaagaagccaaaaaagcaacatacacttttggtaatgctccagtaaaagccgaggctgaaatcacaaaagacggattgccggtgggcttggaagtttcaactgaaggtcctaaaccaatctatgctgataagctttatcagccagaacctcaagtgggagacgaaacttggactgacctagacggaaaaaccgaagagtatggagggagggttcttaaacctgaaactaaaatgaaaccctgctacggatcttttgctaaacctactaatattaaaggaggtcaggcaaaggtaaaaccaaaagaagacgatggcactaacaacatcgagtatgacattgacatgaacttctttgacttaagatcacaaagatcagaactcaaacctaaaattgtaatgtatgcagaaaatgtggacctggaatgtccagatactcatgttgtgtacaaacctggagtttcagatgctagttctgagaccaatcttggacaacagtctatgcccaacagacccaactacattggcttcagagataacttcatcggacttatgtactataacagtactggcaacatgggggtactggctggccaagcgtctcagttgaatgcagtggttgacttgcaggacagaaacacagaactgtcttaccaactcttgcttgactctctgggcgacagaaccagatactttagcatgtggaatcaggctgtggacagttatgatcctgatgtacgtgttattgaaaatcatggtgtggaagatgaacttcccaactattgttttccgttggatggtgtcggtccgcgaacagatagttacaaggagattaagccaaatggagaccaatctacttggacaaatgtagacccaactggcagcagtgaacttgctaagggaaatccatttgccatggaaattaaccttcaagccaatctatggcgaagtttcctttattccaatgtggctctatatctcccagactcgtacaaatacaccccgtccaatgtcactcttccagaaaacaaaaacacctacgactacatgaacgggcgggtggtgccgccatctctagtagacacctatgtgaacattggtgccaggtggtctctggatgccatggacaatgtcaacccattcaaccaccaccgtaacgctggcttgcgttaccgatccatgcttctgggtaacggacgttatgtgcctttccacatacaagtgcctcaaaaattcttcgctgttaaaaacctgctgcttctcccaggctcctacacttatgagtggaactttaggaaggatgtaaacatggttctacagagttccctcggtaacgacctacgggtagatggcgccagcatcagttttacgagcatcaacctctatgctacttttttccccatggctcacaacaccgcttccacccttgaagccatgctgcggaatgacaccaatgatcagtcattcaacgactacctatctgcagctaacatgctctaccccattcctgccaatgcaaccaatattcccatttccattccttctcgcaactgggcggctttcagaggctggtcatttaccagactgaaaaccaaagaaactccctctttggggtctggatttgacccctacttcgtctattctggttctattccctacctggatggtaccttctacctgaaccacacttttaagaaggtttccatcatgtttgactcttcagtgagctggcctggaaatgacaggttactatctcctaacgaatttgaaataaagcgcactgtggatggcgaaggctacaacgtagcccaatgcaacatgaccaaagactggttcttggtacagatgctcgccaactacaacatcggctatcagggcttctacattccagaaggatacaaagatcgcatgtattcatttttcagaaacttccagcccatgagcaggcaggtggttgatgaggtcaattacaaagacttcaaggccgtcgccataccctaccaacacaacaactctggctttgtgggttacatggctccgaccatgcgtcaaggtcaaccctatcccgctaactatccctatccactcattggaacaactgccgtaaatagtgttacgcagaaaaagttcttgtgtgacagaaccatgtggcgcataccgttctcaagcaacttcatgtctatgggagcccttacagacttgggacagaacatgctctatgccaactcagctcatgctctggacatgacctttgaggtggatcccatggatgagcccaccctgctttatcttctcttcgaagttttcgacgtggtcagagtgcatcagccacaccgcggcatcatcgaggcagtctacctgcgtacaccgttctcggccggtaacgctaccacgtaagaagcttcttgcttcttgcaaacagcagctgcaaccatggcctgcggatcccaaaacggctccagcgagcaagagctcagagccattgtccaagacctgggttgcggaccatattttttgggaacctttgataagcgcttcccggggttcatggcccccgataagctcgcctgtgccattgtaaatacggccggacgtgagacggggggagagcactggttggctttcggttggaacccacgttctaacacctgctacctttttgatccttttggattctcggatgatcgtctcaaacagatttaccagtttgaatatgagggtctcctgcgccgcagcgctcttgctaccaaggaccggtgtattacgctggaaaaatctacccagaccgtgcagggcccccgttctgccgcctgcggacttttctgctgcatgttccttcatgcctttgtgcactggcctgaccgtcccatggacggaaaccccaccatgaaattgctaactggagtgccaaacaacatgcttcattctcctaaagtccagcccaccctgtgtgacaatcaaaaagcactctaccattttctcaatacccattcgccttattttcgctctcatcgtacacacatcgaaagggccactgcgttcgaccgtatggatgtgcaataatgattcatgtaaacaacgtgttcaataaacagcactttattttttacatgtatcgaggctctggattacttatttatttacaagtcgaatgggttctgacgagaatcagaatgacccgcaggcagtgatacgttgcggaactgatacttgggttgccacttgaattcgggaatcaccaacttgggaaccggtatatcgggcaggatgtcactccacagctttctggtcagctgcaaagctcccagcaggtcaggagccgaaatcttgaaatcacaattaggaccagtgctctgagcgcgagagttgcggtacaccggattgcagcactgaaacaccatcagcgacggatgtcttacgcttgccagcacggtgggatctgcaatcatgcccacatccagatcttcagcattggcaatgctgaacggggtcatcttgcaggtctgcctacccatggcgggcacccaattaggcttgtggttacaatcgcagtgcagggggatcagtatcatcttggcctgatcctgtctgattcctggatacacggctctcatgaaagcatcatattgcttgaaagcctgctgggctttactaccctcggtataaaacatcccgcaggacctgctcgaaaactggttagctgcgcagccggcatcattcacacagcagcgggcgtcattgttggctatttgcaccacacttctgccccagcggttttgggtgattttggttcgctcgggattctccttcaaggctcgttgtccgttctcgctggccacatccatctcgataatctgctccttctgaatcataatattgccatgcaagcacttcagcttgccctcataatcattgcagccatgaggccacaacgcacagcctgtacattcccaattatggtgggcgatctgagaaaaagaatgtatcattccctgcagaaatcttcccatcatcgtgctcagtgtcttgtgactagtgaaagttaactggatgcctcggtgctcctcgttcacgtactggtgacagatgcgcttgtattgttcgtgctgctcaggcattagtttaaaagaggttctaagttcgttatccagcctgtacttctccatcagcagacacatcacttccatgcctttctcccaagcagacaccaggggcaagctaatcggattcttaacagtgcaggcagcagctcctttagccagagggtcatctttggcgatcttctcaatgcttcttttgccatccttctcaacgatgcgcacgggcgggtagctgaaacccactgctacaagttgcgcctcttctctttcttcttcgctgtcttgactgatgtcttgcatggggacatgtttggtcttccttggcttctttttcgggggtatcggaggaggaggactgtcgctccgttccggagacagggaggattgtgacgtttcgctcaccattaccaactgactgtcggtagaagaacctgaccccacacggcgacaggtgtttctcttcgggggcagaggtggaggcgattgcgaagggctgcggtccgacctggaaggcggatgactggcagaaccccttccgcgttcgggggtgtgctccctgtggcggtcgcttaactgatttccttcgcggctggccattgtgttctcctaggcagagaaacaacagacatggaaactcagccattgctgtcaacatcgccacgagtgccatcacatctcgtcctcagcgacgaggaaaaggagcagagcttaagcattccaccgcccagtcctgccaccacctctaccctagaagataaggaggtcgacgcatctcatgacatgcagaataaaaaagcgaaagagtctgagccagacatcgaacaagacccgggctatgtgacaccggtggaacacgaggaagagttgaaacgctttctagagagagaggatgaaaactgcccaaaacagcaagcggataactatcaccaagatgctggaaatagggatcagaacaccgactacctcatagggcttgacggggaagacgcgctccttaaacatctagcaagacagtcactcatagtcaaggatgcattattggacagaactgaagtgcccatcagtgtcgaagagctcagccgcgcctacgagcttaacctattttcacctcgtactccccccaaacgtcagccaaacggcacctgcgagccaaatcctcgcttaaacttttatccagcttttgctgtgccagaagtactggctacctatcacatcttttttaaaaatcaaaaaattccagtctcctgccgcgctaatcgcacccgcgccgatgccctactcaatctgggacctggttcacgcttacctgatatagcttccttggaagaggttccaaagatcttcgagggtctgggcaataatgagactcgggccgcaaatgctctgcaaaagggagaaaatggcatggatgagcatcacagcgttctggtggaattggaaggcgataatgccagactcgcagtactcaagcgaagcgtcgaggtcacacactttgcataccccgctgtcaacctgccccctaaagtcatgacggccgtcatggaccagttactcattaagcgcgcaagtcccctttcagaagacatgcatgacccagatgcctgtgatgagggtaaaccagtggtcagtgatgagcagctaacccgatggctgggcaccgactctccccgggatttggaagagcgtcgcaagcttatgatggccgtggtgctggttaccgtagaactagagtgtcttcggcgtttctttaccgattcagaaaccttgcgcaaactcgaagagaatctgcactacacttttagacacggctttgtgcggcaggcatgcaagatatctaacgtggaactcaccaacctggtttcctacatgggtattctgcatgagaatcgcctaggacaaagcgtgctgcacagcacccttaagggggaagcccgccgtgattacatccgcgattgtgtttatctctacctgtgccacacgtggcaaaccggcatgggtgtatggcagcaatgtttagaagaacagaacctgaaagagctaaacaagctcttacagaaatctcttaaggttctgtggacagggttcgacgagcgcaccgtcgcttccgacctggcagacctcatcttcccagagcgtctcagggttactttgcgaaacggactgcctgactttatgagccagagcatgcttaacaattttcgctctttcatcctggaacgctccggtatcctgcccgccacctgctgcgcactgccctccgactttgtgcctctcacctaccgcgaatgccccccgccgctatggagtcactgctacctgttccgtctggccaactacctctcctaccactcggatgtgatcgaggatgtgagcggagacggcttgctggagtgtcactgccgctgcaatctgtgcacgccccaccggtccctagcttgcaacccccagttgatgagcgaaacccagataataggcacctttgaattgcaaggccccagcagccaaggcgatgggtcttctcctgggcaaagtttaaaactgaccccgggactgtggacctccgcctacttgcgcaagtttgccccggaagattaccacccctatgaaatcaagttctatgaggaccaatcacagcctccgaaagccgaactttcggcctgcgtcatcacccagggggcaattctggcccaattgcaagccatccaaaaatcccgccaagaatttctactgaaaaagggtaagggggtctaccttgacccccagaccggcgaggaactcaacacaaggttccctcaggatgtcccaacgacgagaaagcaagaagttgaaggtgcagccgccgcccccagaagatatggaggaagattgggacagtcaggcagaggaagcggaggaggaggacagtctggaggacagtctggaggaagacagtttggaggaggaaaacgaggaggcagaggaggtggaagaagtaaccgccgacaaacagttatcctcggctgcggagacaagcaacagcgctaccatctccgctccgagtcgaggaacccggcggcgtcccagcagtagatgggacgagaccggacgcttcccgaacccaaccagcgcttccaagaccggtaagaaggatcggcagggatacaagtcctggcgggggcataagaatgccatcatctcctgcttgcatgagtgcgggggcaacatatccttcacgcggcgctacttgctattccaccatggggtgaactttccgcgcaatgttttgcattactaccgtcacctccacagcccctactatagccagcaaatcccggcagtctcgacagataaagacagcggcggcgacctccaacagaaaaccagcagcggcagttagaaaatacacaacaagtgcagcaacaggaggattaaagattacagccaacgagccagcgcaaacccgagagttaagaaatcggatctttccaaccctgtatgccatcttccagcagagtcggggccaagagcaggaactgaaaataaaaaaccgatctctgcgttcgctcaccagaagttgtttgtatcacaagagcgaagatcaacttcagcgcactctcgaggacgccgaggctctcttcaacaagtactgcgcgctgactcttaaagagtaggcagcgaccgcgcttattcaaaaaaggcgggaattacatcatcctcgacatgagtaaagaaattcccacgccttacatgtggagttatcagccccaaatgggattggcggcaggcgcctcccaggactactccacccgcatgaattggctcagcgccgggccttctatgatttctcgagttaatgatatacgcgcctaccgaaaccaaatacttttggaacagtcagctcttaccaccacgccccgccaacaccttaatcccagaaattggcccgccgccctagtgtaccaggaaagtcccgctcccaccactgtattacttcctcgagacgcccaggccgaagtccaaatgactaatgcaggtgcgcagttagcgggcggctccaccctatgtcgtcacaggcctcggcataatataaaacgcctgatgatcagaggccgaggtatccagctcaacgacgagtcggtgagctctccgcttggtctacgaccagacggaatctttcagattgccggctgcgggagatcttccttcacccctcgtcaggctgttctgactttggaaagttcgtcttcgcaaccccgctcgggcggaatcgggaccgttcaatttgtggaggagtttactccctctgtctacttcaaccccttctccggatctcctgggcactacccggacgagttcataccgaacttcgacgcgattagcgagtcagtggacggctacgattgatgtctggtgacgcggctgagctatctcggctgcgacatctagaccactgccgccgctttcgctgctttgcccgggaactcattgagttcatctacttcgaactccccaaggatcaccctcaaggtccggcccacggagtgcggattactatcgaaggcaaaatacactctcgcctgcaacgaattttctcccagcggcccgtgctgatcgagcgagaccagggaaacaccacggtttccatctactgcatttgtaatcaccccggattgcatgaaagcctttgctgtcttatgtgtactgagtttaataaaaactgaattaagactctcctacggactgccgcttcttcaacccggattttacaaccagaagaacgaaacttttcctgtcgtccaggactctgttaacttcacctttcctactcacaaactagaagctcaacgactacaccgcttttccagaagcattttccctactaatactactttcaaaaccggaggtgagctccaaggtcttcctacagaaaacccttgggtggaagcgggccttgtagtgctaggaattcttgcgggtgggcttgtgattattctttgctacctatacacaccttgcttcactttcctagtggtgttgtggtattggtttaaaaaatggggcccatactagtcttgcttgttttactttcgcttttggaaccgggttctgccaattacgatccatgtctagacttcgacccagaaaactgcacacttacttttgcacccgacacaagccgcatctgtggagttcttattaagtgcggatgggaatgcaggtccgttgaaattacacacaataacaaaacctggaacaataccttatccaccacatgggagccaggagttcccgagtggtacactgtctctgtccgaggtcctgacggttccatccgcattagtaacaacactttcattttttctgaaatgtgcgatctggccatgttcatgagcaaacagtattctctatggcctcctagcaaggacaacatcgtaacgttctccattgcttattgcttgtgcgcttgccttcttactgctttactgtgcgtatgcatacacctgcttgtaaccactcgcatcaaaaacgccaataacaaagaaaaaatgccttaacctctttctgtttacagacatggcttctcttacatctctcatatttgtcagcattgtcactgccgctcacggacaaacagtcgtctctatccctctaggacataattacactctcataggacccccaatcacttcagaggtcatctggaccaaactgggaagcgttgattactttgatataatctgcaacaaaacaaaaccaataatagtaacttgcaacatacaaaatcttacattgattaatgttagcaaagtttacagcggttactattatggttatgacagatacagtagtcaatatagaaattacttggttcgtgttacccagttaaaaaccacgaaaatgccaaatatggcaaagattcgatccgatgacaattctctagaaacttttacatctcccaccacacccgacgaaaaaaacatcccagattcaatgattgcaattgttgcagcggtggcagtggtgatggcactaataataatatgcatgcttttatatgcttgtcgctacaaaaagtttcatcctaaaaaacaagatctcctactaaggcttaacatttaatttctttttatacagccatggtttccactaccacattccttatgcttactagtcttgcaactctgacttctgctcgctcacacctcactgtaactataggctcaaactgcacactaaaaggacctcaaggtggtcatgtcttttggtggagaatatatgacaatggatggtttacaaaaccatgtgaccaacctggtagatttttctgcaacggcagagacctaaccattatcaacgtgacagcaaatgacaaaggcttctattatggaaccgactataaaagtagtttagattataacattattgtactgccatctaccactccagcaccccgcacaactactttctctagcagcagtgtcgctaacaatacaatttccaatccaacctttgccgcgcttttaaaacgcactgtgaataattctacaacttcacatacaacaatttccacttcaacaatcagcattatcgctgcagtgacaattggaatatctattcttgtttttaccataacctactacgcctgctgctatagaaaagacaaacataaaggtgatccattacttagatttgatatttaatttgttctttttttttttatttacagtatggtgaacaccaatcatggtacctagaaatttcttcttcaccatactcatttgtgcatttaatgtttgcgctactttcacagcagtagccacagcaaccccagactgtataggagcatttgcttcctatgcactttttgcttttgttacttgcatctgcgtatgtagcatagtctgcctggttattaattttttccaacttctagactggatccttgtgcgaattgcctacctgcgccaccatcccgaataccgcaaccaaaatatcgcggcacttcttagactcatctaaaaccatgcaggctatactaccaatatttttgcttctattgcttccctacgctgtctcaaccccagctgcctatagtactccaccagaacaccttagaaaatgcaaattccaacaaccgtggtcatttcttgcttgctatcgagaaaaatcagaaattcccccaaatttaataatgattgctggaataattaatataatctgttgcaccataatttcatttttgatataccccctatttgattttggctggaatgctcccaatgcacatgatcatccacaagacccagaggaacacattcccctacaaaacatgcaacatccaatagcgctaatagattacgaaagtgaaccacaacccccactactccctgctattagttacttcaacctaaccggcggagatgactgaaacactcaccacctccaattccgccgaggatctgctcgatatggacggccgcgtctcagaacagcgacttgcccaactacgcatccgccagcagcaggaacgcgcggccaaagagctcagagatgtcatccaaattcaccaatgcaaaaaaggcatattctgtttggtaaaacaagccaagatatcctacgagatcaccgctactgaccatcgcctctcttacgaacttggcccccaacgacaaaaatttacctgcatggtgggaatcaaccccatagttatcacccagcaaagtggagatactaagggttgcattcactgctcctgcgattccatcgagtgcacctacaccctgctgaagaccctatgcggcctaagagacctgctaccaatgaattaaaaaatgattaataaaaaatcacttacttgaaatcagcaataaggtctctgttgaaattttctcccagcagcacctcacttccctcttcccaactctggtattctaaaccccgttcagcggcatactttctccatactttaaaggggatgtcaaattttagctcctctcctgtacccacaatcttcatgtctttcttcccagatgaccaagagagtccggctcagtgactccttcaaccctgtctacccctatgaagatgaaagcacctcccaacacccctttataaacccagggtttatttccccaaatggcttcacacaaagcccagacggagttcttactttaaaatgtttaaccccactaacaaccacaggcggatctctacagctaaaagtgggagggggacttacagtggatgacactgatggtaccttacaagaaaacatacgtgctacagcacccattactaaaaataatcactctgtagaactatccattggaaatggattagaaactcaaaacaataaactatgtgccaaattgggaaatgggttaaaatttaacaacggtgacatttgtataaaggatagtattaacaccttatggactggaataaaccctccacctaactgtcaaattgtggaaaacactaatacaaatgatggcaaacttactttagtattagtaaaaaacggagggcttgttaatggctacgtgtctctagttggtgtatcagacactgtgaaccaaatgttcacacaaaagacagcaaacatccaattaagattatattttgactcttctggaaatctattaactgatgaatcagacttaaaaattccacttaaaaataaatcttctacagcgaccagtgaaactgtagccagcagcaaagcctttatgccaagtactacagcttatcccttcaacaccactactagggatagtgaaaactacattcatggaatatgttactacatgactagttatgatagaagtctatttcccttgaacatttctataatgctaaacagccgtatgatttcttccaatgttgcctatgccatacaatttgaatggaatctaaatgcaagtgaatctccagaaagcaacatagctacgctgaccacatccccctttttcttttcttacattacagaagacgacaactaaaataaagtttaagtgtttttatttaaaatcacaaaattcgagtagttattttgcctccaccttcccatttgacagaatacaccaatctctccccacgcacagctttaaacatttggataccattagagatagacattgttttagattccacattccaaacagtttcagagcgagccaatctggggtcagtgatagataaaaatccatcgcgatagtcttttaaagcgctttcacagtccaactgctgcggatgcgaatccggagtctggatcacggtcatctggaagaagaacgatgggaatcataatccgaaaacggtatcggacgattgtgtctcatcaaacccacaagcagccgctgtctgcgtcgctccgtgcaactgctgtttatgggatcagggtccacagtgtcctgaagcatgattttaatagcccttaacatcaactttctggtgcgatgcgcgcagcaacgcattctgatttcactcaaatctttgcagtaggtacaacacattattacaatattgtttaataaaccataattaaaagcgctccagccaaaactcatatctgatataatcgcccctgcatgaccatcataccaaagtttaatataaattaaatgacgttccctcaaaaacacactacccacatacatgatctcttttggcatgtgcatattaacaatctgtctgtaccatggacaacgttggttaatcatgcaacccaatataaccttccggaaccacactgccaacaccgctcccccagccatgcattgaagtgaaccctgctgattacaatgacaatgaagaacccaattctctcgaccgtgaatcacttgagaatgaaaaatatctatagtggcacaacatagacataaatgcatgcatcttctcataatttttaactcctcaggatttagaaacatatcccagggaataggaagctcttgcagaacagtaaagctggcagaacaaggaagaccacgaacacaacttacactatgcatagtcatagtatcacaatctggcaacagcgggtggtcttcagtcatagaagctcgggtttcattttcctcacaacgtggtaactgggctctggtgtaagggtgatgtctggcgcatgatgtcgagcgtgcgcgcaaccttgtcataatggagttgcttcctgacattctcgtattttgtatagcaaaacgcggccctggcagaacacactcttcttcgccttctatcctgccgcttagcgtgttccgtgtgatagttcaagtacagccacactcttaagttggtcaaaagaatgctggcttcagttgtaatcaaaactccatcgcatctaattgttctgaggaaatcatccacggtagcatatgcaaatcccaaccaagcaatgcaactggattgcgtttcaagcaggagaggagagggaagagacggaagaaccatgttaatttttattccaaacgatctcgcagtacttcaaattgtagatcgcgcagatggcatctctcgcccccactgtgttggtgaaaaagcacagctaaatcaaaagaaatgcgattttcaaggtgctcaacggtggcttccaacaaagcctccacgcgcacatccaagaacaaaagaataccaaaagaaggagcattttctaactcctcaatcatcatattacattcctgcaccattcccagataattttcagctttccagccttgaattattcgtgtcagttcttgtggtaaatccaatccacacattacaaacaggtcccggagggcgccctccaccaccattcttaaacacaccctcataatgacaaaatatcttgctcctgtgtcacctgtagcgaattgagaatggcaacatcaattgacatgcccttggctctaagttcttctttaagttctagttgtaaaaactctctcatattatcaccaaactgcttagccagaagccccccgggaacaagagcaggggacgctacagtgcagtacaagcgcagacctccccaattggctccagcaaaaacaagattggaataagcatattgggaaccgccagtaatatcatcgaagttgctggaaatataatcaggcagagtttcttgtaaaaattgaataaaagaaaaatttgccaaaaaaacattcaaaacctctgggatgcaaatgcaataggttaccgcgctgcgctccaacattgttagttttgaattagtctgcaaaaataaaaaaaaaaacaagcgtcatatcatagtagcctgacgaacaggtggataaatcagtctttccatcacaagacaagccacagggtctccagctcgaccctcgtaaaacctgtcatggtgattaaacaacagcaccgaaagttcctcgcggtgaccagcatgaataattcttgatgaagcatacaatccagacatgttagcatcagttaacgagaaaaaacagccaacatagcctttgggtataattatgcttaatcgtaagtatagcaaagccacccctcgcggatacaaagtaaaaggcacaggagaataaaaaatataattatttctctgctgctgttcaggcaacgtcgcccccggtccctctaaatacacatacaaagcctcatcagccatggcttaccagacaaagtacagcgggcacgcacaagctctaaagtcactctccaacctctccacaatatatatacacaagccctaaactgacgtaatgggagtaaagtgtaaaaaatcccgccaaacccaacacacaccccgaaactgcgtcaccagggaaaagtacagtttcacttccgcaatcccaacaagcgtcacttcctctttctcacggtacgtcacatcccattaacttgcaacgtcattttcccacggccgcgccgccccgtttagccgttaaccccacagccaatcaccacacaccccacaatttttaaaatcacctcatttacatattggcaccattccatctataaggtatattattgatgatg

SEQ ID NO: 270 - DNA, 35385 bp, Human adenovirus
  misc_feature 1..35385: note = Human adenovirus 50, GenBank Accession No. AY737798
  source 1..35385: mol_type = genomic DNA
caatcaatataatataccttatagatggaatggtgccaatatgtaaatgaggtaatttaaaaaagtgcgcgctgtgtggtgattggctgcggggtgaacggctaaaaggggcggacatgctgggaggtgacgtgacttatgggggaggagttatgttgcaagttatcgcggtaaaggtgacgtaaaacgaggtgtggtttggacacggaagtagacagttttcccacgcttactgacaggatatgaggtagttttgggcggatgcaagtgaaaattctccattttcgcgcgaaaactgaatgaggaagtgaatttctgagtcatttcgcggttatgacagggtggagtatttgccgagggccgagtagactttgaccgtttacgtggaggtttcgattaccgtgtttttcacctaaatttccgcgtacggtgtcaaagtcctgtgtttttacgtaggtgtcagctgatcgctagggtatttaaacctgtcgagttccgtcaagaggccactcttgagtgccagcgagaagagttttctcctccgcgccgcgagtcagttttgcgctttgaaaatgagacacctgcgattcctgccacaggagattatctccagcgagaccgggatagaaatactggagtttgtggtaaataccctgatgggagatgacccggaaccgccagcgcagcctttcgatccacctacgctgcacgatctgtatgatttagaggtagacgggccggacgatcccaatgaggaagctgtaaatgggttttttactgattctatgctactagctgccgatgaaggattggacataaaccctcctcctgagacccttgataccccaggggtggttgtggaaagcggcagaggtgggataaaattgcctgatctgggagcagctgaaatggacttgcgttgttatgaagagggttttcctccgagtgatgatgaagatggggaaactgaacagtccatccataccgcagtgaatgagggagtaaaagctgccagcgatgtttttaagttggactgtccggagctgcctggacatggctgtaagtcttgtgaatttcacaggaataacactggaatgaaagaactattgtgctcgctttgctatatgagaatgcactgccattttatttacagtaagtgtatttaagtgaaatttaaaggaatagtgtagctgtttaataactgttgaatggtagatttatgtttttacttgtgattttttgtaggtcctgtgtctgatgatgagtcgccttctcctgattcaactacctcacctcctgaaattcaggcgcccgtacctgcaaacgtatgcaagcccattcctgtgaagcctaagtctgggaaacgccctgctgtggataagcttgaggacttgttggagggtggggatggacctttggaccttagtacccggaaactgccaaggcaatgagtgccctgcagctgtgtttatttaatgtgacgtcatgtaataaaattatgtcagctgctgagtgttttattgcttcttgggtggggacttggatatataagtaggagcagatctgtgtggttagcttatagcaacctgctgccatccatggaggtttgggctatcttggaagacctgagacagactaggctactgctagaaaacgcctcggacggagtctctggcttttggagattctggttcggtggtgatctagctaggctagtgtttaggataaaacaggactacagggaagaatttgaaaagttattggacgacagtccaggactttttgaagctcttaacttgggccatcaggctcattttaaggagaaggttttatcagttttagatttttctactcctggtagaactgctgctgctgtagcttttcttacttttatattggataaatggatccgacaaacccacttcagcaagggatacgttttggatttcatagcagcagctttgtggagaacatggaaggctcgcagcatgaggacaatcttagattactggccagtgcagcctctgggagtagcagggatactgagacacccaccgaccatgccagcggttctggaggaggagcagcaggaggacaatccgagagccggcctggaccctccggtggaggagtagctgacctgtttcctgaactgcgacgggtgcttactaggtctacgtccagtggacaggacaggggcattaagagggaaaggaatcctagtgggaataattcaagaaccgagttggctttaagtttaatgagccgtaggcgtcctgaaactgtttggtggcatgaggttcagagcgaaggcagggatgaagtttcaatattgcaggagaaatattcactagaacaacttaagacctgttggttggaacctgaggatgattgggaggtggccattaggaattatgctaagatatctctgaggcctgataaacagtatagaattactaaaaagattaatattagaaatgcatgctacatatcagggaatggggcagaggttataatagatacccaagataaagcagcttttagatgttgtatgatgggtatgtggccaggggttgtcggcatggaagcagtaacatttatgaatattaggtttaaaggggatgggtataatggcattgtatttatggctaacactaagctgattctacatggttgtagcttttttgggtttaataatacttgtgtagaagcttgggggcaagttggtgtgaggggttgtagtttttatgcatgctggattgcaacatcaggtagggtcaagagtcagttgtctgtgaagaaatgcatgtttgagagatgtaatcttggcatactgaatgaaggtgaagcaagggtccgccactgcgcagctacagaaactggctgcttcattctaataaagggaaatgccagtgtgaagcataatatgatctgtggacattcgaatgagaggccttatcagatgctgacttgcgctggtggacattgcaatattcttgctaccgtgcatatcgtttcccatgcacgcaagaaatggcctgtatttgaacataatgtgattaccaagtgcaccatgcacataggtggtcgcaggggaatgtttatgccttaccagtgtaacatgaatcatgtgaaggtgatgttggaaccagatgccttttccagagtgagcttaacaggaatctttgatatgaatattcaactatggaagatactgagatatgatgacactaaaccgagggtgcgcgcatgcgaatgcggaggcaagcatgctagattccagccggtgtgcgtggatgtgactgaagacctgagacccgatcatttggtgcttgcctgcactggagcggagttcggttctagtggtgaagaaactgactaaagtgagtagtggggcaagatgtggatggagactttcaggttggtaaggtggacagattgggtaaattttgttaatttctgtcttgcagctgccatgagtggaagcgcttcttttgaggggggagtatttagcccttatctgacgggcaggctcccatcatgggcaggagttcgtcagaatgtcatgggatccactgtggatgggagacccgtccagcccgccaattcctcaacgctgacctatgccactttgagttcgtcaccattggatgcagctgcagccgccgccgctactgctgccgccaacaccatccttggaatgggctattacggaagcatcgttgccaattccagttcctctaataacccttcaaccctggctgaggacaagctacttgttctcttggctcagctcgaggccttaacccaacgcttaggcgaactgtctaagcaggtggcccagttgcgtgagcaaactgagtctgctgttgccacagcaaagtctaaataaagatctcaaatcaataaataaagaaatacttgttataaaaacaaatgaatgtttatttggtttttcgcgcgcggtatgccctggaccatcggtctcgatcattgagaactcggtggatcttttccagtaccctgtaaaggtgggattgaatgtttagatacatgggcattagtccgtctcgggggtggagatagctccattgaagagcctcttgctccggggtagtgttataaatcacccagtcatagcaaggtcggagtgcatggtgttgcacaatatcttttaggagcagactaattgcaacggggaggcccttagtgtaggtgtttacaaatctgttgagctgggacgggtgcatcctgggggaaattatatgcattttggactggatcttgaggttggcaatgttgccgcctagatcccgtctcgggttcatattgtgcagaaccaccaagacagtgtatccggtgcacttgggaaatttatcatgcagcttagagggaaaagcatgaaaaaatttggagacgcctttgtgaccccccagattctccatgcactcatccataatgatagcgatggggccgtgggcagcggcacgggcgaacacgttccgggggtctgaaacatcatagttatgctcctgagtcaggtcatcataagccattttaataaactttgggcggagggtgccagattgggggatgaaagttccctctggcccgggagcatagtttccctcacatatttgcatttcccaggctttcagttccgagggggggatcatgtccacctgcggggctataaaaaataccgtttctggagccggggtgattaactgggatgagagcaaattcctaagcagctgagacttgccgcacccagtgggaccgtaaatgaccccaattacgggttgcagatggtagtttagggagcgacagctgccgtcctcccggagcaggggggccacttcgttcatcatttcccttacatggatattttcccgcaccaagtccgttaggaggcgctctcccccaagggatagaagctcctggagcgaggagaagtttttcaacggtttcagcccgtcagccatgggcattttggaaagagtctgttgcaagagctcgagccggtcccagagctcggtgatgtgctctatggcatctcgatccagcagacctcctcgtttcgcgggttgggacggctcctggagtagggaatcagacgatgagcgtccagcgctgctagggtccgatccttccatggtcgcagcgtccgagtcagggttgtttccgtcacggtgaaggggtgcgcgcctggttgggcgcttgcgagggtgcgcttcagactcatcctgctggtcgagaaccgctgccgatcggcgccctgcatgtcggccaggtagcagtttaccatgagttcgtagttgagcgcctcggccgcgtggcctttggcacggagcttacctttggaagttttatggcaggcggggcagtagatacatttgagggcatacagcttgggcgcgaggaaaatggattcgggggagtatgcatccgcaccgcaggaggcgcagacggtttcgcactccacgagccaggtcagatccggctcatcggggtcaaaaacaagttttccgccatgttttttgatgcgtttcttacctttggtttccatgagttcgtgtccccgctgggtgacaaagaggctgtccgtgtccccgtagaccgactttatgggcctgtcctcgagcggagtgcctcggtcctcttcgtagaggaacccagcccactctgatacaaaagcgcgtgtccaggccagcacaaaggaggccacgtgggaggggtagcggtcgttgtcaaccagggggtccaccttctctacggtatgtaaacacatgtccccctcctccacatccaagaatgtgattggcttgtaagtgtaggccacgtgaccaggggtccccgccgggggggtataaaagtgggcgggcctctgttcgtcctcactgtcttccggatcactgtccaggagcgccagctgttggggtaggtattctctctcgaaggcgggcatgacctctgcactcaggttgtcagtttctaggaacgaggaggatttgatattgacagtaccagcagagatgcctttcataagactctcgtccatctggtcagaaaacacaatcttcttgttatccagcttggtggcaaatgatccatagagggcattggatagaagcttggcgatggagcgcatggtttggttcttttccttgtccgcgcgctccttggcggcgatgttaagctggacgtactcgcgcgccacacatttccattcagggaagatggttgtcagttcatccggaactattctgactcgccatcccctattgtgcagggttatcagatccacactggtggctacctcgcctcggaggggctcattggtccagcagagtcgacctccttttcttgaacagaaaggggggagggggtctagcatgaactcatcaggggggtccgcatctatggtaaatattcccggtagcaaatctttgtcaaaatagctgatggtggcgggatcatccaaggtcatctgccattctcgaactgccagcgcgcgctcgtaggggttaagaggggtgccccagggcatggggtgggtgagcgcggaggcatacatgccacagatatcgtagacatagaggggctcttcgaggatgccgatgtaagtgggataacagcgcccccctctgatgcttgctcgcacatagtcatagagttcatgtgagggggcgagaagacccgggcccagattggtgcggttgggtttttccgccctgtaaacgatctggcgaaagatggcatgggaattggaagagatagtaggtctctggaatatgttaaaatgggcatgaggtaggcctacagagtcccttatgaagtgggcatatgactcttgcagcttggctaccagctcggcggtgacgagtacgtccagggcacagtagtcgagagtttcctggatgatgtcataacgcggttggcttttcttttcccacagctcgcggttgagaaggtattcttcgcgatccttccagtactcttcgaggggaaacccgtctttttctgcacggtaagagcccaacatgtagaactgattgactgccttgtagggacagcatcccttctccactgggagagagtatgcttgggctgcattgcgcagcgaggtatgagtgagggcaaaagtgtccctgaccatgactttgaggaattgatacttgaagtcgatgtcatcacaggccccctgttcccagagttggaagtccacccgcttcttgtaggcggggttgggcaaagcgaaagtaacatcattgaagaggatcttgccggccctgggcatgaaatttcgggtgattctgaaaggctgagggacctctgctcggttattgataacctgagcggccaagacgatctcatcaaagccattgatgttgtgccccactatgtacagttctaagaatcgaggggtgcccctgacatgaggcagcttcttgagttcttcaaaagtgaggtctgtagggtcagtgagagcatagtgttcgagggcccattcgtgcacgtgagggttcgctttgaggaaggaggaccagaggtccactgccagtgctgtttgtaactggtcccggtactgacgaaaatgctgcccgactgccatcttttctggggtgacgcaatagaaggtttgggggtcctgccgccagcgatcccacttgagttttatggccaggtcataggcgatgttgacgagccgctggtctccagagagtttcatgaccagcatgaaggggattagctgcttgccaaaggaccccatccaggtgtaggtttccacatcgtaggtgaggaagagcctttctgtgcgaggatgagagccaatcgggaagaactggatctcctgccaccagttggaggaatggctgttgatgtgatggaagtagaactccctgcgacgcgccgagcattcatgcttgtgcttgtacagacggccgcagtactcgcatcgattcacgggatgcacctcatgaatgagttgtacctgacttcctttgacgagaaatttcagtggaaaattgaggcctggcgattgtacctcgcgctctactatgttgtctgcatcggcatgaccatcttctgtctcgatggtggtcatgctgacgagccctcgcgggaggcaagtccagacctcggcgcggcaggggcggagctcgaggacgagagcgcgcaggccggagctgtccagggtcctgagacgctgcggagtcaggttagtaggcagtgtcaggagattgacttgcatgatcttttcgagggcgtgagggaggttcagatggtacttgatctccacgggtccgttggtggagatgtcgatggcttgcagggttccgtgccccttgggcgctaccaccgtgcccttgtttttccttttgggcggcggtggctctgttgcttcttgcatgtttagaagcggtgtcgagggcgcgcaccgggcggcaggggcggttcgggacccggcggcatggccggcagtggtacgtcggcgccgcgcgcgggtaggttctggtactgcgccctcagaagactcgcatgcgccacgacgcggcggttgacatcctggatctgacgcctctgggtgaaagctaccggccccgtgagcttgaacctgaaagagagttcaacagaatcaatctcggtatcgttgacggcggcttgcctaaggatttcttgcacgtcgccagagttgtcctggtaggcgatctcggccatgaactgctcgatctcttcctcttgaagatctccgcggcccgctctctcgacggtggccgcgaggtcgttggagatacgcccaatgagttgagagaatgcattcatgcccgcctcgttccagacgcggctgtagaccacagcccccacgggatctctcgcgcgcatgaccacctgggcgaggttgagctccacgtggcgggtgaagaccgcatagttgcataggcgctggaaaaggtagttgagtgtggtggcgatgtgctcggtgacgaagaaatacatgatccatcgtctcagcggcatctcgctgacatcgcccagcgcttccaagcgctccatggcctcgtagaagtccacggcaaagttgaaaaactgggagttacgcgcggacacggtcaactcttcttccaaaagacggatgagttcggcgatggtggtgcgcacctcgagctcgaaagcccctgggatttcttcctcaatctcttcttcttccactaacatctcttcctcttcaggtggggctgcaggaggagggggaacgcggcgacgccggcggcgcacgggcagacggtcgatgaatctttcaatgacctctccgcggcggcggcgcatggtctcggtgacggcacgaccgttctccctgggtctcagagtgaagacgcctccgcgcatctccctgaagtggtgactgggaggctctccgttgggcagggacaccgcgctgattatgcattttattaattgccccgtaggtactccgcgcaaggacctgatcgtctcaagatccacgggatctgaaaacctttcgacgaaagcgtctaaccagtcgcaatcgcaaggtaggctgagcactgtttcttgcgggcgggggcggctagacgctcggtcggggttctctctttcttctccttcctcctctttggagggtgagacgatgctgctggtgatgaaattaaaataggcagttttgagacggcggatggtggcgaggagcaccaggtctttgggtccggcttgttggatgcgcaggcgatgggccattccccaagcattatcctgacatctggccagatctttatagtagtcttgcatgagtcgttccacgggcacttcttcttcgcccgctctgccatgcatgcgagtgatcccgaacccgcgcatgggctggacaagtgccaggtccgctacaaccctttctgcgaggatggcttgctgcacctgggtgagggtggcttggaagtcgtcaaagtccacgaagcggtggtaagccccggtgttgattgtgtaggagcagttggccatgactgaccagttgactgtctggtgcccagggcgcacaagctcggtatacttaaggcgcgagtatgcgcgggtgtcaaagatgtaatcgttacaggtgcgcaccaggtactggtagccgatgagaaagtgcggcggcggctggcggtataggggccatcgctctgtagccggggcgccaggggcgaggtcttccagcatgaggcggtgataaccgtagatgtacctggacatccaggtgataccggaggcggtggtggatgcccgcgggaactcgcgtacgcggttccagatgttgcgcagcggcatgaagtagttcatggtaggcacggtttggcccgtgagacgtgcacagtcgttgatgctctagacatacgggcaaaaacgaaagcggtcagcggctcgtctccgtggcctggaggctaagcgaacgggttgggctgcgcgtgtaccccggttcgaatctcggatcaggctggagccgcagctaacgtggtactggcactcccgtctcgacccaggcctgcacaaaacctccaggatacggaggcgggtcgtttttttttttttggctttttcctggatgggagccaatgctgcgtcaagctttagaacactcagttctcggggctgggagtggctcgcgcccgtagtctggagaatcaatcgccagggttgcgttgcggtgtgccccggttcgagtcttagcgcgccggatcggccggtttccgcgacaagcgagggtttggcagcctcgtcatttctaagaccccgccagccgacttctccagtttacgggagcgagccctctttttttgtttttttgttgcccagatgcatcccgtgctgcgacagatgcgcccccagcaacagcccccttctcagcagcagctacaacaacagccacaaaaggctcttcctgctcctgtaactactgcggctgcagccgtcagcggcgcggggcagcccgcctatgatctggacttggaagagggcgagggactggcgcgcctgggcgcaccatcgcccgagcggcacccgcgggtgcaactgaaaaaggactctcgcgaggcgtacgtgccccagcagaacctgttcagggacaggagcggcgaggagcctgaggaaatgcgagcttcccgctttaacgcgggtcgcgaactgcgtcacggtctggaccgaagacgggtgctgcgtgatgatgattttgaagtcgatgaagtgacaggaataagtcctgctagggcacatgtggccgcggccaacctagtatcagcttacgagcagaccgtgaaggaggagcgcaactttcaaaaatctttcaacaaccatgtgcgcaccctgattgcccgcgaggaagtgacactgggtctgatgcacctgtgggacctgatggaagccattacccagaaccccaccagcaaacctctaaccgctcagctgtttctggtggtgcaacatagtagagacaatgaggcatttagggaggcgctgttgaacattactgagcccgaggggagatggttgtatgatcttatcaatattctgcaaagtataatcgtgcaagaacgtagcctgggtctagctgagaaggtggctgctattaactactcggtcttgagcctgggcaagcactacgctcgcaagatctacaaaaccccatacgtacctatagacaaggaggtgaagatagatgggttttatatgcgcatgactctcaaggtgctgaccttgagtgacgatctgggagtgtaccgcaacgacaggatgcaccgcgcagtgagcgccagcagaaggcgtgagctgagcgacagagaacttatgcacagcttgcaaagagctctgactggggctggaaccgagggggaaaactactttgacatgggagcggacttgcagtggcagcccagtcgcagggccctggacgcagcagggtatgagcttccttacatagaagaggtggatgaaggccaggatgaggagggcgagtatctggaagactgatggcgcgaccatccatatttttgctagatggaacagcaggcaccggaccccgcaaaacgggcggcgctacagagccagccgtccggcattaactcctcggacgattggagccaggccatgcaacgcatcatggcgctgacgacccgcaaccccgaagcctttagacagcaaccccaggccaaccgcctttctgccatcctggaggccgtagtgccctcccgctccaaccccacacacgagaaggtcctggccatcgtgaacgcgctggtggagaacaaagccatacgtcccgatgaggctgggctggtatacaatgccctattggagcgcgtagcccgttacaacagcagcaacgtgcagaccaacctggaccggatggtgaccgatgtgcgcgaggccgtgtctcagcgcgagcggttccagcgagacgccaatttagggtcgctggtggctttgaacgccttcctcagcactcagcctgccaacgtgcctcgcggtcagcaagactacacaaactttctaagtgcattgagactcatggtggccgaagtccctcaaagcgaagtgtaccagtccgggccagactactttttccagaccagcagacagggcttgcagacagtgaacctgagccaggcttttaagaacctgaatggtctgtggggagtgcgcgccccagtgggagatcgggcgaccgtgtctagcttgctgacccccaactcccgcctactactgctcttggtagccccattcactgacagcggtagcatcgaccgtaattcgtacttgggctatctgttgaacctgtatcgcgaggccatagggcaaactcaggtagatgagcaaacctatcaagaaattacccaagtgagccgcgctctgggtcgggaggacactggcagcttggaagccaccttaaacttcttgctgaccaaccggtcgcagaagatccctcctcagtattcgcttaccgcggaggaggaacggatcctgagatacgtgcagcagagcgtgggactgttcctaatgcaggagggggcgactcctactgctgcgctcgatatgacagcccgaaacatggagcccagcatgtatgccagtaaccggccttttatcaataaactgctagactacttacacagggcggctgctatgaactctgattatttcaccaatgctatcctgaacccccattggctgcccccacctgggttctatacgggcgagtatgacatgcccgaccccaatgacgggtttttatgggacgatgtggacagtagtgttttctccccgcctcctggttataacacttggaagaaggaaggtggcgatagaaggcactcttccgtgtcactgtccggagcaacgggtgctgcagcggctcccgaggccgcaagtcctttccctagtttgccattttcgctaaacagtgtacgcagcagtgagctgggaagaataacccgtcctcgcttgatcggcgaggaggagtatttgaacgactccctgttgagacccgagagggagaagaatttccccaacaacgggatagaaagcttggttgacaaaatgaaccgctggaagacgtacgcgcacgatcacagggacgatccccgggcgctgggggatagccggggcatcgctacccgtaaacgccagtggcacgacaggcagcggggcctggtgtgggccgatgatgattccgccgacgacagcagcgtgttggacttgggtgggagtggtggtaacccgttcgctcacctgcgcccccgcgtcgggcgcctgatgtaagaaaccgaaaataaatactcaccaaggccatggcgaccagcgtgcgttcgtttcttctctgttatagctagtatgatgaggcgaaccgtgctaggcggagcggtggtgtatccggagggtcctcctccttcgtacgagagcgtgatgcagcaggcggcggcggcggcgatgcagccaccactggaggctccctttgtaccccctcggtacctggcacctacggaggggagaaacagcattcgttactcggagctggcaccattgtatgataccacccggttgtatttggtggacaacaagtccgcggacatcgcctcactgaactatcagaacgaccacagcaacttcctcaccacggtggtgcaaaacaatgactttacccccacggaggccagcacccagaccatcaactttgacgagcggtcgcgatggggcggtcagctgaagactatcatgcacaccaacatgcccaacgtgaacgagtacatgtttagcaacaagttcaaagctcgggtgatggtgtctagaaaggctcctgaaggtgtcacagtagatgacaattatgatcacaagcaggatattttggaatatgagtggtttgagtttactctaccggaagggaacttctcagccacaatgaccattgacctaatgaacaatgccatcattgataattaccttgaagtgggcagacagaatggagtgttggagagtgacattggtgttaaatttgacaccaggaactttagactgggttgggatccggaaactaagttgattatgcctggggtttacacctatgaggcattccatcctgacattgtattgttgcctggttgcggagttgactttactgaaagtcgccttagtaacttgcttggtatcaggaaaagacacccattccaggagggttttaagatcttgtatgaggatcttgaagggggtaatatcccggccctgttggatgtagaagcctataagaacagtaagaaagaacgagaagccaaaacagaagccgctaaagctgctgctattgctaaagccaacatagttgtcagcgaccctgtaagggtggctaatgccgaagaagtcagaggagacaactatacagcttcatctgttgcaactgaagaatcgctattggctgctgtggccgaaactacagagaccaaactcactattaaacctgtagaaaaagacagcaagagtagaagttacaatgtcttggaagataaagtgaatacagcctaccgcagctggtacctgtcctacaactatggtgaccctgaaaaaggagtccgttcctggacactgctcaccacctcggatgtcacctgtggagcagagcaggtgtactggtcgctcccagacatgatgcaggaccctgtcacattccgttccacgagacaagtcagcaactatccagtggtaggtgcagagctcatgccggtcttctcaaagagtttctacaacgagcaagccgtgtactcccagcagcttcgccagtccacctcgctcacgcacgtcttcaaccgcttccctgagaaccagatcctcatccgcccgccagcgcccaccattaccaccgtcagtgaaaacgttcctgctctcacagatcacgggaccctgccgttgcgcagcagtatccggggagtccagcgcgtgaccgttactgacgccagacgccgcacctgcccctacgtctacaaggccctgggcatagtcgcgccgcgcgtcctttcaagccgcactttctaaaaaaaaatgtccattcttatctcacctagtaataacaccggttggggcctgcgcgcgccaagcaagatgtacggaggtgctcgcaaacgctctacacagcaccctgtgcgcgtgcgcgggcacttccgcgctccatggggcgccctcaagggtcgtacccgcactagaaccaccgtcgatgatgtgatcgaccaggtggtggccgatgctcgtaattatactcctactgcacctacatctactgtggatgcagttattgacagcgtagtggctgacgcccgcgcctatgctcgccggaagagcaggcggagacgcatcgccaggcgccaccgggctactcccgctatgcgagcggcaagagctctgctgaggagggccaaacgcgtggggcgaagagctatgcttagagcggccagacgcgcggcttcaggtgccagtgccggcaggtcccgcaggcgcgcagccacggcggcagcagcggccattgccaacatggcccaaccgcgaagaggcaatgtgtactgggtgcgcgacgccaccaccggccagcgcgtgcccgtgcgcacccgcccccctcgctcttagaagatactgagcagtctccgatgttgtgtcccagcgaggatgtccaagcgcaaatacaaggaagagatgctccaggtcatcgcgcctgaaatctacggtccgccggtgaaggatgaaaaaaagccccgcaaaatcaagcgggtcaaaaaggacaaaaaggaagaagatggcaatgatggtctggcggagtttgtacgcgagttcgccccaaggcggcgagtgcagtggcgtggacgcaaagtgcagcctgtgctgagacctggaaccacggtggtctttacgcccggcgagcgctccagcactgcttttaagcggtcctatgatgaggtgtatggggatgatgatattctggagcaggcggccgaccgcctgggcgagtttgcttatggcaagcgctcccgctcgagccccaaggaggaggcggtgtccattcccttggacaatgggaatcccacccctagtctcaagccagtcaccctgcagcaagtgctgcccgtgcctccacgcagaggcaacaagcgagagggtgaggatctgtatcccactatgcaattgatggtgcccaagcgccagcggctggaggacgtgctggagaaaatgaaagtggatcccgatatacaacctgaggtcaaagtgagacccatcaagcaggtggcgccaggtttgggagtacaaaccgtagacatcaagattcccaccgagtcaatggaagtccaaaccgaacctgcaaagcccacaaccacctccattgaggtgcaaacggatccctggatgaccgcacccgttacaactccagctgctgtcaacaccactcgaagatcccggcgaaagtacggtccagcaagtttgctgatgccaaattatgctctgcacccatccattattccaactccgggttaccgaggcactcgctactaccgcagcaggagcagcacttcccgccgtcgccgcaaaacacctgcaagtcgtagtcatcgtcgtcgccgccgccccaccagcaatctgactcccgctgctctggtgcggagagtgtatcgcgatggccgcgcggatcccctgacgttaccgcgcgtacgctaccatccaagcatcacaacttaacaactgttgccgctgcctccttgcagatatggccctcacttgccgccttcgtgtccccattactggctaccgaggaagaaactcgcgccgtagaagagggatgttggggcgcggaatgcgacgccacaggcggcggcgcgctatcagcaagaggctggggggtggctttctgcctgctctgatccccatcatagccgcggcgatcggggcgataccaggcatagcttccgtggcggttcaggcctcgcagcgccactgacattggaaaaacttataaataaaacagaatggactctgatgctcctggtcctgtgactatgtttttgtagagatggaagacatcaatttttcatccctggctccgcgacacggcacgaggccgtacatgggcacctggagcgacatcggcaccagccaactgaacgggggcgccttcaattggagcagtatctggagcgggcttaaaaattttggctctaccataaaaacctatgggaacaaagcttggaacagcagcacagggcaggcattgaaaaataagcttaaagagcaaaacttccaacagaaggtggttgatggaatcgcctctggtatcaatggggtggtggatctggccaaccaggccgtgcagaaacagataaacagccgccttgacccgccgccgtcagcccctggtgaaatggaagtggaggaagatctccctccccttgaaaagcggggcgacaagcgtccgcgccccgatctggaggagacactagtcacacgctcagacgacccgccctcctacgaggaggcagtgaagcttggaatgcccaccaccagacctgtagcccccatggctaccggggtaatgaaaccttctcagtcacaccgacccgctaccttggacttgcctccccctgctgttgcagcgcctgctcgcaagcctgtcgctaccccgaagcccaccaccgtacagcccgtcgccgtagccagaccgcgtcctgggggcactccacgtccgaatgcaaactggcagagtactctgaacagcatcgtgggtctgggcgtgcaaagtgtaaagcgccgtcgctgcttttaaattaaatatggagtagcgcttaacttgcctgtctgtgtgtatgtgtcatcatcacgccgccgccgcagcaacagcagaggagcaaggaagaggtcgcgcgccgaggctgagttgatttcaagatggccaccccatcgatgctgccccagtgggcatacatgcacatcgccggacaggatgcttcggagtacctgagtccgggtctggtgcagttcgcccgcgccacagacacctacttcaatctggggaacaagtttaggaaccccaccgtggcgcccacccatgatgtgaccaccgaccgcagtcagcggctgatgctgcgctttgtgcccgttgaccgggaagacaatacctacgcatacaaagttcgatacaccttggctgtgggcgacaacagagtgctggatatggccagcactttctttgacattcggggtgtgttggatagaggtcctagcttcaagccatattctggcactgcttacaactcattggcccctaagggcgctcccaatacatctcagtggcttaataagggagatgaagaggatggggaagacgaccaacaagctacatacacttttggcaatgcgccagtaaaagccgaagctgaaattacaaaagaaggactgccaataggtttggaagttccatctgaaggtggccctaaacccatttatgctgataaactgtatcagccagaacctcaggtgggagaggaatcttggactgatacggatggcacagatgaaaaatatggaggcagagcacttaaacctgaaactaaaatgaaaccctgctacgggtctttcgctaaacctactaatgttaaaggcgggcaggcaaaagtgaagaaagaagaagaaggcaaggttgaatatgacattgacatgaactttttcgacctaagatcacaaatgactggcctcaagcctaaaattgtaatgtatgcagaaaatgtggatctagaaactcctgacactcatgtggtgtacaaacctggagcttcagatgctagctctcatgcaaaccttggtcaacagtccatgcccaatagacctaactatattggcttcagggacaacttcatcggactcatgtactacaacagtactggcaacatgggagtgctggctggacaagcgtctcagctaaatgcagtggttgacttgcaagacagaaacacagaattgtcatatcaactcttgcttgattctctgggggacagaaccagatatttcagtatgtggaatcaagcagtggatagctatgacccagatgtgcgtgttattgagaaccatggtgtggaagatgaacttcctaactattgttttccattggatggtgtaggtccgcgaatagacagttacaagggaattgagacaaatggtgatgaaaccactacttggaaagatttagagccaaagggcataagtgaaattgctaagggaaatccgtttgccatggaaattaacctccaagctaatctctggagaagttttctttattccaatgtggctctgtatctcccagactcctacaaatacaccccagccaatgtcactcttccaactaacaccaacacttatgactacatgaatgggcgggtggttcccccatccctggtggatacctacgtaaacattggcgccagatggtctttggatgccatggacaatgtcaacccctttaaccatcaccgcaacgctggcctgcgataccggtccatgcttttgggcaatggtcgttacgtgcctttccacattcaagtgcctcagaaattctttgctgtgaagaacctgctgcttctacccggttcttacacctacgagtggaacttcagaaaggatgtgaacatggtcctgcagagttcccttggtaatgatctccgggtcgatggtgccagcataagttttaccagcatcaatctctatgccaccttcttccccatggcccacaacactgcctccacccttgaagccatgctgcgcaatgacaccaatgatcaatcattcaatgactacctttctgctgccaacatgctctaccccatcccggccaacgctaccaacgttcccatctccattccctctcgcaactgggccgccttcagaggctggtccttcaccagactcaaaaccaaggagactccctctttgggatcagggttcgatccctactttgtttactctggttctataccctacctggatggtaccttctaccttaaccacactttcaagaaagtctccatcatgtttgactcttcagtgagctggcctggtaatgacagattgctaagtccaaatgagttcgaaatcaagcgcacagttgatggggaaggctacaatgtggcccaatgtaacatgaccaaagactggttcctggtccagatgcttgccaactacaacattggataccagggcttctacgttcctgagggttacaaggatcgcatgtactccttcttcagaaacttccagcccatgagtagacaggtggttgatgagattaactacaaagactataaagctgtcgccgtaccctaccagcataataactctggctttgtgggttacatggctcctaccatgcgtcagggtcaagcgtaccctgctaactacccataccccctaattggaaccactgcagtaaccagtgtcacccagaaaaaattcctgtgcgacaggaccatgtggcgcatcccattctctagcaacttcatgtccatgggtgcccttacagacctgggacagaacttgctgtatgccaactcggcccatgcgctggacatgacttttgaggtggatcccatggatgagcccaccctgctttatcttcttttcgaagtcttcgacgtggtcagagtgcaccagccacaccgcggcgtcatcgaggccgtctacctgcgcacaccgttctcggccggcaacgccaccacataagaagcctcttgcttcttgcaagcagcagctgcagccatgtcatgcgggtccggaaacggctccagcgagcaagagctcaaagccatcgtccgagacctgggctgcggaccctatttcctgggaacctttgacaagcgtttcccggggttcatggcccccgacaagctcgcctgcgccatagtcaacactgccggacgcgagacggggggagagcactggctggcttttggttggaacccgcgctccaacacctgctacctttttgatccttttgggttctcggatgagcgactcaaacagatttaccagtttgagtacgaggggctcctgcgccgcagtgcccttgctaccaaagaccgctgcatcaccctggaaaagtccacccagagcgtgcagggcccgcgctcagccgcctgtggacttttttgctgtatgttccttcatgcctttgtgcactggcccgaccgccccatgaacggaaaccccaccatgaagttgctgactggggtgtcaaacagcatgctccaatcaccccaagtccagcccaccctgcgccgcaaccaggaggcgctatatcgcttcctaaacacccactcatcttactttcgttctcaccgcgcacgcattgaaagggccaccgcgtttgaccgtatggatatgcaataagtcatgtaaaaccgtgttcaataaaaagcattttatttttacatgcactaaggctctggttttttgctcattcgttttcatcattcactcagaaatcaaatgggttctggcgggagtcagagtgacccgtgggcagggagacgttgcggaactgtaacctgttctgccacttgaactcggggatcaccagcttgggaactggaatttcgggaaaggtgtcttgccacaactttctggtcagttgcagggcgccaagcaggtcaggagcagagatcttgaaatcacagttggggccggcattctggacacgggagttgcggtacactgggttgcaacactggaacaccatcaaggctgggtgtctcacgcttgccagcacggtcgggtcactgatggtagtcacatccaagtcttcagcattggccattccaaagggggtcatcttacaggtctgcctgcccatcacgggagcgcagcctggcttgtggttgcaatcgcaatgaatggggatcagcatcatcctggcttggtcgggggttatccctgggtacacggccttcatgaaggcttcgtactgcttgaaagcttcctgagccttacttccctcggtgtaaaacatcccacaggacttgctggaaaattggttagtagcacagttggcatcattcacacagcagcgggcatcgttgttggccaactggaccacatttctgccccagcggttctgggtgatcttggctctgtctgggttctccttcatagcgcgctgcccgttttcgctcgccacatccatctcgataatgtggtccttctggatcatgatagtgccatgcaggcatttcaccttgccttcgtaatcggtgcatccatgagcccacagagcgcacccggtgcactcccaattattgtgggcgatctcagaataagaatgcaccaatccctgcatgaatcttcccatcatcgctgtcagggtcttcatgctactaaatgtcagcgggatgccacggtgctcctcgttcacatactggtggcagatacgcttgtactgctcgtgctgctctggcatcagcttgaaagaggttctcaggtcattatccagcctatacctctccattagcacagccatcacttccatgcccttctcccaggcagataccaggggcaagctcaaaggattcctaacagcaatagaagtagctcctttagctatagggtcattcttgtcgatcttctcaacacttctcttgccatccttctcaatgatgcgcaccggggggtagctgaagcccacggccaccaactgagcctgttctctttcttcttcgctgtcctggctgatgtcttgcagagggacatgcttggtcttcctgggcttcttcttgggagggatcgggggaggactgttgctccgttccggagacagggatgaccgcgaagtttcgcttaccagtaccacctggctctcgatagaagaatcggaccccacgcgacggtaggtgttcctcttcgggggcagaggtggaggcgactgagatgggctgcggtccggccttggaggcggatggctggcagagcccattccgcgttcgggggtgtgctcccgttggcggtcgcttgactgatttcctccgcggctggccattgtgttctcctaggcagagaaacaacagacatggaaactcagccatcactgccaacatcgctgcaagcgccatcacacctcgcccccagcagcgacgaggaggagagcttaaccaccccaccacccagtcccgctaccaccacctctaccctcgatgatgaggaggaggtcgacgcagcccaggagatgcaggcgcaggataatgtgaaagcggaagagattgaggcagatgtcgagcaggacccgggctatgtgacaccggcggagcacgaggaggagctgaaacgttttctagacagagaggatgacgaccgcccagagcatcaccaggaggctggcctcggggatcatgttgccgactacctctccgggcttgggagggaggacgtgctcctcaaacatctagcaaggcagtcgatcatagttaaagacgcactactcaacctcaccgaagtgcctatcagtgtggaagagcttagccgcgcctacgagctgaacctcttttcgcctcagataccccccaagcggcagcgaaacggcacctgcgaggccaaccctcgactcaacttctatccagcttttactgtccccgaagtgctggccacctaccacatcttttttaagaaccaaaagattccagtctcctgccgcgccaaccgcacccgcgcagatgcccttctcaacttgggtccgggagctcgcttacctgatatagcttccttggaagaggttccaaagatctttgagggtctgggaagtgatgagactcgggccgcaaatgctctgcaacagggagagaatggtatggatgaacatcacagcgctctagtggaactggagggtgacaatgcccggcttgcagtgctcaagcgcagtatcgtggtcacccattttgcctaccccgctgttaacctgccgcccaaagtcatgagcgctgtcatggaccatctgctcatcaaacgagcaagtccactttcagaaaaccagaacatgcaggatccagacgcctcggaggagggcaagccggtagtcagtgacgagcagctatctcgctggctgggtaccaactccccccgagatttggaagaaagacgcaagcttatgatggctgtagtgctagtaactgttgagttggagtgtctgcgccgcttttttaccgaccccgagaccctgcgcaagctagaggagaacctgcactacaccttcagacatggcttcgtgcgccaggcatgcaagatctccaacgtggagctcaccaacctggtttcatacatgggcattttgcatgagaaccggctagggcagagcgttctgcacaccaccctgaagggggaggcccgccgcgactacatccgagactgtgtctacctctacctctgccatacctggcagactggtatgggtgtgtggcaacagtgtttggaagagcagaaccttaaagagctggacaagctcttgcagagatccctcaaagccctgtggacaggttttgacgagcgcaccgtcgcctcggacctggcggacatcatcttccccgagcgtcttagggttactctgcgaaacggcctgccagacttcatgagccagagcatgcttaacaactttcgctctttcatcctggaacgctccggtatcctgcctgccacctgctgtgcgctgccctccgactttgtgcctctcacctaccgcgagtgcccaccgccgctatggagccactgctacctattccgcctggccaactacctctcctaccactcggatgtgatagaggatgtgagcggagacggcctgctggaatgccactgccgatgcaatttatgcacaccccaccgctccctcgcctgcaacccccagttgctaagcgagacccagatcatcggcaccttcgagttgcagggtcccaacagtgaaggcgaggggtcttctccggggcagagtctgaaactgacaccggggctgtggacctccgcctacctgcgcaagtttcatcccgaggactatcatccctatgagatcaggttctatgaggaccagtcacatcctcccaaagtcgagctctcagcctgcgtcatcacccagggggcaattctggcccaattgcaagccatccaaaaatcccgccaagaatttctgctgaaaaagggaagcggggtctaccttgacccccagaccggtgaggagctcaacacaaggttcccccaggatgtcccatcgccgaggaagcaagaagctgaaggtgcagctgtcacccccagaggatatggaggaagactgggacagtcaggcagaggaggagatggaagattgggacagccaggcagaggaggtggacagcctggaggaagacagtttggaggaggaagacgaggaggcagaggaggtggaagaagcaaccgccgccaaacagttgtcatcggcggcggagacaagcaagtccccagacagcagcacggctaccatctccgctccgggtcggggggcccagcggcggcccaacagtagatgggacgagaccgggcgatttccaaacccgaccaccgcttccaagaccggtaagaaggagcgacagggatacaagtcctggcgtggacataaaaacgctatcatctcctgcttgcatgaatgcgggggcaacatatccttcacccggcgatacctgcttttccaccacggtgtgaacttcccccgcaatatcttgcattactaccgtcacctccacagcccctactgcagtcagcaagtcccggcaaccccgacagaaaaagacagcagcgacaacggtgaccagaaaagcagcagttagaaaatccacaacaagtgcagcaggaggaggactgaggatcacagcgaacgagccagcgcagaccagagagctgaggaaccggatctttccaaccctctatgccatcttccagcagagtcgggggcaagagcaggaattgaaagtaaaaaaccgatctctgcgctcgctcaccagaagttgtttgtatcacaagagcgaagaccaacttcagcgcactctcgaggacgccgaggctctcttcaacaagtactgcgcgctgactcttaaagagtagcccttgcccgcgctcattcgaaaacggcgggaatcacgtcacccttggcagctgtcctttgccctcgtcatgagtaaagagattcccacgccttacatgtggagctatcagccccaaatggggttggcagcaggtgcttcccaggactactccacccgcatgaattggcttagcgccgggccctcaatgatatcacgggttaatgatatacgagcttatcgaaaccagttactcctagaacagtcagctcttaccaccacaccccgccaacaccttaatccccgaaattggcccgccgccctggtgtaccaggaaaatcccgctcccaccaccgtactacttcctcgagacgcccaggccgaagttcagatgactaacgcaggtgtacagctggcgggcggttccgccctatgtcgtcaccggcctcaacagagtataaaacgcctggtgatcagaggccgaggtatccagctcaacgacgagtcggttagctcttcgcttggtctgcgaccagacggagtcttccagatcgccggctgtgggagatcttccttcactcctcgtcaggctgtgctgactttggagagttcgtcctcgcagccccgctcgggcggcatcggaactctccagtttgtggaggagtttactccctctgtctacttcaaccccttctccggctctcctggccagtacccggacgagttcataccgaacttcgacgcaatcagcgagtcagtggatggctatgattgatgtctaatggtggcgcggctgagctagctcgactgcgacacctagaccactgccgccgctttcgctgtttcgcccgggaactcaccgagttcatctacttcgaactctccgaggagcaccctcagggtccggcccacggagtgcggattaccatcgaagggggaatagactctcgcctgcatcgcatcttctcccagcggcccgtgctgattgagcgcgaccagggaaatacaaccatctccatctactgcatctgtaaccaccccggattgcatgaaagcctttgctgtcttgtttgtgctgagtttaataaaaactgagttaagaccttcctacggactaccgcttcttcaatcaggactttacaacaccaaccagatcttccagaagacccagacccttcctcctctgatccaggactctaactctaccttaccagcaccctccactactaaccttcccgaaactaacaagcttggatctcatctgcaacaccgcctttcacgaagccttctttctgccaatactaccactcccaaaaccggaggtgagctccgcggtcttcctactgacgacccctgggtggtagcgggttttgtaacgttaggattagttgcgggtgggcttgtgctaatcctttgctacctatacacaccttgctgtgcatatttagtcatattgtgctgttggtttaagaaatgggggccatactagtcgtgcttgctttactttcgcttttgggtctgggctctgctaatctcaatcctcttgatcacaatccatgtctagacttcgacccagaaaattgcacacttacttttgcacccgacacaagccgtctctgtggagttcttattaagtgcggatgggactgcaggtccgttgaaattacacataataacaaaacatggaacaataccttatccaccacatgggagccaggagttcccgagtggtatactgtctctgtccgaggtcctgacggttccattcgcattagtaacaacactttcattttttctgaaatgtgcgatctggccatgtttatgagcaaacagtatgacctatggcctcctagcaaagagaacattgtggcattttccattgcttattgcttggtaacatgcatcatcactgctatcatttgtgtgtgcatacacttgcttatagttattcgccctagacaaagcaatgaggaaaaagagaaaatgccttaacctttttcctcataccttttctttacagcatggcttctgttacagctctaattattgccagcattgtcactgtcgctcacgggcaaacaattgtccatattaccttaggacataatcacactcttgtagggcccccaattacttcagaggttatttggaccaaacttggaagtgttgattattttgatataatttgcaacaaaactgaaccaatatttgtaatctgtaacagacaaaatctcacgttaattaatgttagcaaaatttataacggttactattatggttatgatagatccagtagccaatataaaaattacttagttcgcataactcagcccaaatcaacagtgccaactatgacaataattaaaatggctaataaagcattagaaaattttacattaccaacaacgcccaatgaaaaaaacattccaaattcaatgattgcaattattgcggcggtggcattgggaatggcactaataataatatgcatgttcctatatgcttgttgctataaaaagtttcaacataaacaggatccactactaaattttaacatttaattttttatacagatgatttccactacaatttttatcattactagccttgcagctgtaacttatggccgttcacacctaactgtacctgttggctcaacatgtacactacaaggaccccaagaaggctatgtcacttggtggagaatatatgataatggagggttcgctagaccatgtgatcagcctggtacaaaattttcatgcaacggaagagacttgaccattattaacataacattaaatgagcaaggcttctattatggaaccaactataaaaatagtttagattacaacattattgtagtgccagccaccacttctgctccccgcaaatccactttctctagcagcagtgccaaagcaagcacaattcctaaaacagcttctgctatgttaaagcttcgaaaaatcgctttaagtaattccacagcagctcccaatacaattcctaaatcaacaattggcatcattactgccgtggtagtgggattaatgattatatttttgtgcataatgtactacgcctgctgctatagaaaacatgaacaaaaaggtgatgcattactaaattttgatatttaattttttatagaattatgatattgtttcaatccaatgccactaacactatcaatgtgcagactactttaaaacatgacatggaaaaccacactacctcctatgcatacacaaatattcagcctaaatacgctatgcaactagaaatcaccatactaattgtaattggaattcttatactatctgttattctttattttatattctgccgtcaaatacccaatgttcatagaaattctaaaagacgtcccatctattctcctatgattagtcgtccccatatggctctgaatgaaatctaagatctttttttttcttttacagtatggtgaacatcaatcatgattcctagaaatttcttcttcaccatactcatctgtgctttcaatgtctgtgctactttcacagcagtagccactgcaagcccagactgtataggaccatttgcttcctatgcactttttgcctttgttacttgcatctgcgtgtgtagcatagtctgcctggttattaattttttccaactggtagactggatctttgtgcgaattgcctacctacgtcaccatcccgaataccgcaatcaaaatgttgcggcacttcttaggcttatttaaaaccatgcaggctatgctaccagttattttaattctgctactaccctgcattgccctaccttccaccgccactcgcgctacacctgaacaacttagaaaatgcaaatttcaacaaccatggtcatttcttgattgctaccatgaaaaatctgattttcccacatactggatagtgattgttggaataattaacatactttcatgtacctttttctcaatcacaatataccccacatttaattttgggtggaattctcccaatgcactgggttacccacaagagctagatgaacatatcccactacaacacatacaacaaccactagcattggtagagtatgaaaatgagccacaaccttcactgcctcctgctattagttacttcaacctaaccggcggagatgactgaaatactcaccacctccaattccgccgaggatctgcttgatatggacggccgcgcctcagaacagcgactcgcccaactacgcatccgccagcagcaggaacgcgtgaccaaagagctcagagatgtcatccaaattcaccaatgcaaaaaaggcatattttgtttggtaaaacaagccaagatatcctacgagatcaccgctactgaccatcgcctctcttacgaacttggcccccaacgacaaaaatttacatgcatggtgggaatcaaccctatagttatcacccagcaaagtggagatactaagggttgcattcactgctcttgcgattccaccgagtgcacctacaccctgctgaagaccctatgcggcctaagagacctgctacccatgaattaaaaattaataaaaaattacttacttgaaatcagcaataaggtctctgttgaaattttttcccagcagcacctcgcttccctcttcccaactctggtattctaaaccccgttcagcggcatactttctccatactttaaaggggatgtcaaattttagctcctctcctgtacccacgatcttcatgtctttcttcccagatgaccaagagagtccggctcagtgattccttcaaccctgtctacccctatgaagacgaaagcacctcccaacacccctttataaacccagggtttatttccccaaatggctttacacaaagcccagacggagttcttactttaaattgtttaaccccactaacaaccacaggcgggcctttacagttaaaagtgggagggggacttatagtggatgacactgatgggaccttacaagaaaacatacgtgttacagcacccattactaaaaataatcattctgtagaactatccattggaaatggattagaaacacaaaacaataaactatgtgccaaattgggaaatgggttaaaatttaacaacggtgacatttgtataaaggatagtattaacaccttatggactggaataaagcctccacctaactgtcaaatagtggaaaacactgatacaaacgatggcaaacttactttagtattagtaaaaaacggaggacttgttaatggctacgtatctctagttggtgtatcagacactgtgaaccaaatgttcacacaaaagtcagcaaccatacaattaagattatatttcgactcttctggaaatctattaactgatgaatcaaacttaaaaattccacttaaaaataaatcttctacagcaaccagtgaagctgcaaccagcagcaaagcctttatgccaagtactacagcttatccctttaacaccactactagggatagtgaaaactatattcatggaatatgttactatatgactagttatgatagaagtctagttcccttaaacatttctataatgctaaacagccgtacgatttcttccaatgttgcctatgccatacaatttgaatggaatctaaatgcaaaagaatctccagaaagcaacatagctacgctgaccacatccccctttttcttttcttatattagagaagacgacaactaaaaaataaagtttaagtgtttttatttaaaaatcacaaaattcgagtagttattttgcctcccccttcccatttaacagaatacaccaatctctccccacgcacagctttaaacatttggataccattagagatagacatagttttagtttccacattccaaacagtttcagagcgagccaatctggggtcagtgatacataaaaatgcatcgggatagtcttttaaagcgctttcacagtccaactgctgcggatgcgactccggagtctggatcacagtcatctggaagaagaacgatgggaatcataatccgaaaacggaatcgggcgattgtgtctcatcaaacccacaagcagccgctgtctgcgtcgctccgtgcgactgctgtttatgggatcggggtctgcagtgtcctgaagcatgattttaatagcccttaacattaactttctggtgcgatgcgcgcagcaacgcattctgatttcactgagattactacagtatgtacagcacattatcacaatattgtttaataaaccataattaaaagcgctccagccaaaactcatatctgatacaatcgcccctgcatgaccatcataccaaattttaatataaattaaatgtcgttccctcaaaaacacactacccacatacatgatctcttttggcatgtgcatattaacaatctgtctgtaccatggacaacgttggttaatcatgcaacccaatataaccttccggaaccacactgccaacaccgctcccccagccatgcattgaagtgaaccctgctgattacaatgacaatgaagaacccaattctctcgaccatgaatcacttgagactgaaaaatatctatagtagcacaacaaagacataaatgcatgcatcttctcataatttttaactcatctggatttaaaaacatatcccaaggaatgggaaactcttgcaaaacagtaaagctggcagaacaaggaagaccacgaacacaacttacactatgcatagtcatagtatcacaatctggcaacagcgggtggtcttcagtcatagaagctcgggtttcattttcctcacatcgtggtaactgggctctggtgtaagggtgatgtctggcgcatgatgtcgagcgtgcgcgcaaccttgtcataatggagttgtttcctgacattctcgtattttgtatagcaaaacgcggccctggcacaacacactcttcttcgtcttctatcctgccgcttagtgtgttccgtctgataattcaagtacagccacactcttaagttggtcaaaagaatgctggcttcagttgtaatcaaaactccatcatatttaattgttctaaggaaatcatccacggtagcatatgcaaatcccaaccaagcaatgcaactggattgcgtttcaagcagcagaggagagggaagagacggaagaatcatgttaatttttattccaaacgatctcgcagtacttcaaattgtagatcgcgcagatggcatctatcgcccccactgtgttggtgaaaaagcacagctaaatcaaaagaaatgcgattttcaaggtgctcaacggtggcttccaacaaagcctccacgcgcacatccaaaaacaaaagaataccaaaagaaggagcattttctaactcctcaaacatcatattacattcctgcaccattcccagataattttcagctttccagccttgaattattcgtgtcagttcttgtggtaaatccaaaccacacattacaaacaggtcccggagggcgccctccaccaccattcttaaacacaccctcataatgacaaaatatcttgctcctgtgtcacctgtagcaaattaagaatggcatcatcaattgacatgcccttggctctaagttcttctctaagttctagttgtaaatactctctcatattatcaccaaactgcttagccaaaagccccccgggaacaatagcaggggacgctacagtgcagtacaagcgcagacctccccaattggctccagcaaaaacaagattagaataagcatactgggaaccaccagtaatatcatcaaagttgctggaaatataatcaggcagaatttcttgtaaaaattgaataaaagaaaaattttccaaagaaacattcaaaatctctgggatgcaaatgcaataggttaccgcgctgcgctccaacattgttagttttgaattagtctgcaaaataaaagaaacaagcgtcatatcatagtagcctgtcgaacaggtggataaatcagtctttccatcacaagacaagccacagggtctccagctcgaccctcgtaaaacctgtcatcgtgattaaacaacagcaccgaaagttcctcgcggtggccagcatgaataattcttgatgaagcatataatccagacatgttagcatcagttaaagagaaaaaacagccaacatagcctctgggtataattatgcttaatcttaagtatagcaaagccacccctcgcggatacaaagtaaaaggcacaggagaataaaaaatataattatttctctgctgctgttcaggcaacgtcgcccccggtccatctaaatacacatacaaagcctcatcagccatggcttaccagacaaagtacagcgggcgcacaaagcacaagctctaaagaagctctaaagacactcttcaacctctccacaatatatacacaagccctaaactgacgtaatgggagtaaagtgtaaaaaatcccgccaagcccaacacacaccccgaaactgcgtcagcagggaaaagtacagtttcacttccgcattcccaacaagcgtaagttcctctttctcatggtacgtcacatccgattaacttgcaacgtcattttcccacggtcgcaccgccccttttagccgttcaccccgcagccaatcaccacacagcgcgcacttttttaaattacctcatttacatattggcaccattccatctataaggtatattatattgattg

SEQ ID NO: 271 - DNA, 34794 bp, Human adenovirus
  misc_feature 1..34794: note = Human adenovirus 35, GenBank Accession No. AY128640
  source 1..34794: mol_type = genomic DNA
catcatcaataatataccttatagatggaatggtgccaatatgtaaatgaggtgattttaaaaagtgtgggccgtgtggtgattggctgtggggttaacggttaaaaggggcggcgcggccgtgggaaaatgacgttttatgggggtggagtttttttgcaagttgtcgcgggaaatgttacgcataaaaaggcttcttttctcacggaactacttagttttcccacggtatttaacaggaaatgaggtagttttgaccggatgcaagtgaaaattgctgattttcgcgcgaaaactgaatgaggaagtgtttttctgaataatgtggtatttatggcagggtggagtatttgttcagggccaggtagactttgacccattacgtggaggtttcgattaccgtgttttttacctgaatttccgcgtaccgtgtcaaagtcttctgtttttacgtaggtgtcagctgatcgctagggtatttatacctcagggtttgtgtcaagaggccactcttgagtgccagcgagaagagttttctcctctgcgccggcagtttaataataaaaaaatgagagatttgcgatttctgcctcaggaaataatctctgctgagactggaaatgaaatattggagcttgtggtgcacgccctgatgggagacgatccggagccacctgtgcagctttttgagcctcctacgcttcaggaactgtatgatttagaggtagagggatcggaggattctaatgaggaagctgtgaatggcttttttaccgattctatgcttttagctgctaatgaaggattagaattagatccgcctttggacactttcaatactccaggggtgattgtggaaagcggtacaggtgtaagaaaattacctgatttgagttccgtggactgtgatttgcactgctatgaagacgggtttcctccgagtgatgaggaggaccatgaaaaggagcagtccatgcagactgcagcgggtgagggagtgaaggctgccaatgttggttttcagttggattgcccggagcttcctggacatggctgtaagtcttgtgaatttcacaggaaaaatactggagtaaaggaactgttatgttcgctttgttatatgagaacgcactgccactttatttacagtaagtgtgtttaagttaaaatttaaaggaatatgctgtttttcacatgtatattgagtgtgagttttgtgcttcttattataggtcctgtgtctgatgctgatgaatcaccatctcctgattctactacctcacctcctgatattcaagcacctgttcctgtggacgtgcgcaagcccattcctgtgaagcttaagcctgggaaacgtccagcagtggagaaacttgaggacttgttacagggtggggacggacctttggacttgagtacacggaaacgtccaagacaataagtgttccatatccgtgtttacttaaggtgacgtcaatatttgtgtgagagtgcaatgtaataaaaatatgttaactgttcactggtttttattgctttttgggcggggactcaggtatataagtagaagcagacctgtgtggttagctcataggagctggctttcatccatggaggtttgggccattttggaagaccttaggaagactaggcaactgttagagagcgcttcggacggagtctccggtttttggagattctggttcgctagtgaattagctagggtagtttttaggataaaacaggactataaacaagaatttgaaaagttgttggtagattgcccaggactttttgaagctcttaatttgggccatcaggttcactttaaagaaaaagttttatcagttttagacttttcaaccccaggtagaactgctgctgctgtggcttttcttacttttatattagataaatggatcccgcagactcatttcagcaggggatacgttttggatttcatagccacagcattgtggagaacatggaaggttcgcaagatgaggacaatcttaggttactggccagtgcagcctttgggtgtagcgggaatcctgaggcatccaccggtcatgccagcggttctggaggaggaacagcaagaggacaacccgagagccggcctggaccctccagtggaggaggcggagtagctgacttgtctcctgaactgcaacgggtgcttactggatctacgtccactggacgggataggggcgttaagagggagagggcatccagtggtactgatgctagatctgagttggctttaagtttaatgagtcgcagacgtcctgaaaccatttggtggcatgaggttcagaaagagggaagggatgaagtttctgtattgcaggagaaatattcactggaacaggtgaaaacatgttggttggagccagaggatgattgggaggtggccattaaaaattatgccaagatagctttgaggcctgataaacagtataagatcagtagacggattaatatccggaatgcttgttacatatctggaaatggggctgaggtggtaatagatactcaagacaagacagttattagatgctgcatgatggatatgtggcctggagtagtcggtatggaagcagtcacttttgtaaatgttaagtttaggggagatggttataatggaatagtgtttatggccaataccaaacttatattgcatggttgtagcttttttggtttcaacaatacctgtgtagatgcctggggacaggttagtgtacgggggtgtagtttctatgcgtgttggattgccacagctggcagaaccaagagtcaattgtctctgaagaaatgcatattccaaagatgtaacctgggcattctgaatgaaggcgaagcaagggtccgtcactgcgcttctacagatactggatgttttattttaattaagggaaatgccagcgtaaagcataacatgatttgtggtgcttccgatgagaggccttatcaaatgctcacttgtgctggtgggcattgtaatatgctggctactgtgcatattgtttcccatcaacgcaaaaaatggcctgtttttgatcacaatgtgttgaccaagtgcaccatgcatgcaggtgggcgtagaggaatgtttatgccttaccagtgtaacatgaatcatgtgaaagtgttgttggaaccagatgccttttccagaatgagcctaacaggaatctttgacatgaacacgcaaatctggaagatcctgaggtatgatgatacgagatcgagggtgcgcgcatgcgaatgcggaggcaagcatgccaggttccagccggtgtgtgtagatgtgaccgaagatctcagaccggatcatttggttattgcccgcactggagcagagttcggatccagtggagaagaaactgactaaggtgagtattgggaaaactttggggtgggattttcagatggacagattgagtaaaaatttgttttttctgtcttgcagctgacatgagtggaaatgcttcttttaaggggggagtcttcagcccttatctgacagggcgtctcccatcctgggcaggagttcgtcagaatgttatgggatctactgtggatggaagacccgttcaacccgccaattcttcaacgctgacctatgctactttaagttcttcacctttggacgcagctgcagccgctgccgccgcctctgtcgccgctaacactgtgcttggaatgggttactatggaagcatcgtggctaattccacttcctctaataacccttctacactgactcaggacaagttacttgtccttttggcccagctggaggctttgacccaacgtctgggtgaactttctcagcaggtggccgagttgcgagtacaaactgagtctgctgtcggcacggcaaagtctaaataaaaaaaattccagaatcaatgaataaataaacgagcttgttgttgatttaaaatcaagtgtttttatttcatttttcgcgcacggtatgccctggaccaccgatctcgatcattgagaactcggtggattttttccagaatcctatagaggtgggattgaatgtttagatacatgggcattaggccgtctttggggtggagatagctccattgaagggattcatgctccggggtagtgttgtaaatcacccagtcataacaaggtcgcagtgcatggtgttgcacaatatcttttagaagtaggctgattgccacagataagcccttggtgtaggtgtttacaaaccggttgagctgggaggggtgcattcgaggtgaaattatgtgcattttggattggatttttaagttggcaatattgccgccaagatcccgtcttgggttcatgttatgaaggactaccaagacggtgtatccggtacatttaggaaatttatcgtgcagcttggatggaaaagcgtggaaaaatttggagacacccttgtgtcctccgagattttccatgcactcatccatgataatagcaatggggccgtgggcagcggcgcgggcaaacacgttccgtgggtctgacacatcatagttatgttcctgagttaaatcatcataagccattttaatgaatttggggcggagcgtaccagattggggtatgaatgttccttcgggccccggagcatagttcccctcacagatttgcatttcccaagctttcagttctgagggtggaatcatgtccacctggggggctatgaagaacaccgtttcgggggcgggggtgattagttgggatgatagcaagtttctgagcaattgagatttgccacatccggtggggccataaataattccgattacaggttgcaggtggtagtttagggaacggcaactgccgtcttctcgaagcaagggggccacctcgttcatcatttcccttacatgcatattttcccgcaccaaatccattaggaggcgctctcctcctagtgatagaagttcttgtagtgaggaaaagtttttcagcggttttagaccgtcagccatgggcattttggaaagagtttgctgcaaaagttctagtctgttccacagttcagtgatgtgttctatggcatctcgatccagcagacctcctcgtttcgcgggtttggacggctcctggagtagggtatgagacgatgggcgtccagcgctgccagggttcggtccttccagggtctcagtgttcgagtcagggttgtttccgtcacagtgaaggggtgtgcgcctgcttgggcgcttgccagggtgcgcttcagactcattctgctggtggagaacttctgtcgcttggcgccctgtatgtcggccaagtagcagtttaccatgagttcgtagttgagcgcctcggctgcgtggcctttggcgcggagcttacctttggaagttttcttgcataccgggcagtataggcatttcagcgcatacagcttgggcgcaaggaaaatggattctggggagtatgcatccgcgccgcaggaggcgcaaacagtttcacattccaccagccaggttaaatccggttcattggggtcaaaaacaagttttccgccatattttttgatgcgtttcttacctttggtctccataagttcgtgtcctcgttgagtgacaaacaggctgtccgtatctccgtagactgattttacaggcctcttctccagtggagtgcctcggtcttcttcgtacaggaactctgaccactctgatacaaaggcgcgcgtccaggccagcacaaaggaggctatgtgggaggggtagcgatcgttgtcaaccagggggtccaccttttccaaagtatgcaaacacatgtcaccctcttcaacatccaggaatgtgattggcttgtaggtgtatttcacgtgacctggggtccccgctgggggggtataaaagggggcggttctttgctcttcctcactgtcttccggatcgctgtccaggaacgtcagctgttggggtaggtattccctctcgaaggcgggcatgacctctgcactcaggttgtcagtttctaagaacgaggaggatttgatattgacagtgccggttgagatgcctttcatgaggttttcgtccatttggtcagaaaacacaatttttttattgtcaagtttggtggcaaatgatccatacagggcgttggataaaagtttggcaatggatcgcatggtttggttcttttccttgtccgcgcgctctttggcggcgatgttgagttggacatactcgcgtgccaggcacttccattcggggaagatagttgttaattcatctggcacgattctcacttgccaccctcgattatgcaaggtaattaaatccacactggtggccacctcgcctcgaaggggttcattggtccaacagagcctacctcctttcctagaacagaaagggggaagtgggtctagcataagttcatcgggagggtctgcatccatggtaaagattcccggaagtaaatccttatcaaaatagctgatgggagtggggtcatctaaggccatttgccattctcgagctgccagtgcgcgctcatatgggttaaggggactgccccagggcatgggatgggtgagagcagaggcatacatgccacagatgtcatagacgtagatgggatcctcaaagatgcctatgtaggttggatagcatcgcccccctctgatacttgctcgcacatagtcatatagttcatgtgatggcgctagcagccccggacccaagttggtgcgattgggtttttctgttctgtagacgatctggcgaaagatggcgtgagaattggaagagatggtgggtctttgaaaaatgttgaaatgggcatgaggtagacctacagagtctctgacaaagtgggcataagattcttgaagcttggttaccagttcggcggtgacaagtacgtctagggcgcagtagtcaagtgtttcttgaatgatgtcataacctggttggtttttcttttcccacagttcgcggttgagaaggtattcttcgcgatccttccagtactcttctagcggaaacccgtctttgtctgcacggtaagatcctagcatgtagaactgattaactgccttgtaagggcagcagcccttctctacgggtagagagtatgcttgagcagcttttcgtagcgaagcgtgagtaagggcaaaggtgtctctgaccatgactttgagaaattggtatttgaagtccatgtcgtcacaggctccctgttcccagagttggaagtctacccgtttcttgtaggcggggttgggcaaagcgaaagtaacatcattgaagagaatcttaccggctctgggcataaaattgcgagtgatgcggaaaggctgtggtacttccgctcgattgttgatcacctgggcagctaggacgatttcgtcgaaaccgttgatgttgtgtcctacgatgtataattctatgaaacgcggcgtgcctctgacgtgaggtagcttactgagctcatcaaaggttaggtctgtggggtcagataaggcgtagtgttcgagagcccattcgtgcaggtgaggatttgcatgtaggaatgatgaccaaagatctaccgccagtgctgtttgtaactggtcccgatactgacgaaaatgccggccaattgccattttttctggagtgacacagtagaaggttctggggtcttgttgccatcgatcccacttgagtttaatggctagatcgtgggccatgttgacgagacgctcttctcctgagagtttcatgaccagcatgaaaggaactagttgtttgccaaaggatcccatccaggtgtaagtttccacatcgtaggtcaggaagagtctttctgtgcgaggatgagagccgatcgggaagaactggatttcctgccaccagttggaggattggctgttgatgtgatggaagtagaagtttctgcggcgcgccgagcattcgtgtttgtgcttgtacagacggccgcagtagtcgcagcgttgcacgggttgtatctcgtgaatgagctgtacctggcttcccttgacgagaaatttcagtgggaagccgaggcctggcgattgtatctcgtgctcttctatattcgctgtatcggcctgttcatcttctgtttcgatggtggtcatgctgacgagcccccgcgggaggcaagtccagacctcggcgcgggaggggcggagctgaaggacgagagcgcgcaggctggagctgtccagagtcctgagacgctgcggactcaggttagtaggtagggacagaagattaacttgcatgatcttttccagggcgtgcgggaggttcagatggtacttgatttccacaggttcgtttgtagagacgtcaatggcttgcagggttccgtgtcctttgggcgccactaccgtacctttgttttttcttttgatcggtggtggctctcttgcttcttgcatgctcagaagcggtgacggggacgcgcgccgggcggcagcggttgttccggacccgggggcatggctggtagtggcacgtcggcgccgcgcacgggcaggttctggtattgcgctctgagaagacttgcgtgcgccaccacgcgtcgattgacgtcttgtatctgacgtctctgggtgaaagctaccggccccgtgagcttgaacctgaaagagagttcaacagaatcaatttcggtatcgttaacggcagcttgtctcagtatttcttgtacgtcaccagagttgtcctggtaggcgatctccgccatgaactgctcgatttcttcctcctgaagatctccgcgacccgctctttcgacggtggccgcgaggtcattggagatacggcccatgagttgggagaatgcattcatgcccgcctcgttccagacgcggctgtaaaccacggccccctcggagtctcttgcgcgcatcaccacctgagcgaggttaagctccacgtgtctggttaagaccgcatagttgcataggcgctgaaaaaggtagttgagtgtggtggcaatgtgttcggcgacgaagaaatacatgatccatcgtctcagcggcatttcgctaacatcgcccagagcttccaagcgctccatggcctcgtagaagtccacggcaaaattaaaaaactgggagtttcgcgcggacacggtcaattcctcctcgagaagacggatgagttcggctatggtggcccgtacttcgcgttcgaaggctcccgggatctcttcttcctcttctatctcttcttccactaacatctcttcttcgtcttcaggcgggggcggagggggcacgcggcgacgtcgacggcgcacgggcaaacggtcgatgaatcgttcaatgacctctccgcggcggcggcgcatggtttcagtgacggcgcggccgttctcgcgcggtcgcagagtaaaaacaccgccgcgcatctccttaaagtggtgactgggaggttctccgtttgggagggagagggcgctgattatacattttattaattggcccgtagggactgcgcgcagagatctgatcgtgtcaagatccacgggatctgaaaacctttcgacgaaagcgtctaaccagtcacagtcacaaggtaggctgagtacggcttcttgtgggcgggggtggttatgtgttcggtctgggtcttctgtttcttcttcatctcgggaaggtgagacgatgctgctggtgatgaaattaaagtaggcagttctaagacggcggatggtggcgaggagcaccaggtctttgggtccggcttgctggatacgcaggcgattggccattccccaagcattatcctgacatctagcaagatctttgtagtagtcttgcatgagccgttctacgggcacttcttcctcacccgttctgccatgcatacgtgtgagtccaaatccgcgcattggttgtaccagtgccaagtcagctacgactctttcggcgaggatggcttgctgtacttgggtaagggtggcttgaaagtcatcaaaatccacaaagcggtggtaagcccctgtattaatggtgtaagcacagttggccatgactgaccagttaactgtctggtgaccagggcgcacgagctcggtgtatttaaggcgcgaataggcgcgggtgtcaaagatgtaatcgttgcaggtgcgcaccagatactggtaccctataagaaaatgcggcggtggttggcggtagagaggccatcgttctgtagctggagcgccaggggcgaggtcttccaacataaggcggtgatagccgtagatgtacctggacatccaggtgattcctgcggcggtagtagaagcccgaggaaactcgcgtacgcggttccaaatgttgcgtagcggcatgaagtagttcattgtaggcacggtttgaccagtgaggcgcgcgcagtcattgatgctctatagacacggagaaaatgaaagcgttcagcgactcgactccgtagcctggaggaacgtgaacgggttgggtcgcggtgtaccccggttcgagacttgtactcgagccggccggagccgcggctaacgtggtattggcactcccgtctcgacccagcctacaaaaatccaggatacggaatcgagtcgttttgctggtttccgaatggcagggaagtgagtcctatttttttttttttttgccgctcagaatgcatcccgtgctgcgacagatgcgcccccaacaacagcccccctcgcagcagcagcagcagcaaccacaaaaggctgtccctgcaactactgcaactgccgccgtgagcggtgcgggacagcccgcctatgatctggacttggaagagggcgaaggactggcacgtctaggtgcgccttcgcccgagcggcatccgcgagttcaactgaaaaaagattctcgcgaggcgtatgtgccccaacagaacctatttagagacagaagcggcgaggagccggaggagatgcgagcttcccgctttaacgcgggtcgtgagctgcgtcacggtttggaccgaagacgagtgttgcgagacgaggatttcgaagttgatgaagtgacagggatcagtcctgccagggcacacgtggctgcagccaaccttgtatcggcttacgagcagacagtaaaggaagagcgtaacttccaaaagtcttttaataatcatgtgcgaaccctgattgcccgcgaagaagttacccttggtttgatgcatttgtgggatttgatggaagctatcattcagaaccctactagcaaacctctgaccgcccagctgtttctggtggtgcaacacagcagagacaatgaggctttcagagaggcgctgctgaacatcaccgaacccgaggggagatggttgtatgatcttatcaacattctacagagtatcatagtgcaggagcggagcctgggcctggccgagaaggtagctgccatcaattactcggttttgagcttgggaaaatattacgctcgcaaaatctacaagactccatacgttcccatagacaaggaggtgaagatagatgggttctacatgcgcatgacgctcaaggtcttgaccctgagcgatgatcttggggtgtatcgcaatgacagaatgcatcgcgcggttagcgccagcaggaggcgcgagttaagcgacagggaactgatgcacagtttgcaaagagctctgactggagctggaaccgagggtgagaattacttcgacatgggagctgacttgcagtggcagcctaatcgcagggctctgagcgccgcgacggcaggatgtgagcttccttacatagaagaggcggatgaaggcgaggaggaagagggcgagtacttggaagactgatggcacaacccgtgttttttgctagatggaacagcaagcaccggatcccgcaatgcgggcggcgctgcagagccagccgtccggcattaactcctcggacgattggacccaggccatgcaacgtatcatggcgttgacgactcgcaaccccgaagcctttagacagcaaccccaggccaaccgtctatcggccatcatggaagctgtagtgccttcccgatctaatcccactcatgagaaggtcctggccatcgtgaacgcgttggtggagaacaaagctattcgtccagatgaggccggactggtatacaacgctctcttagaacgcgtggctcgctacaacagtagcaatgtgcaaaccaatttggaccgtatgataacagatgtacgcgaagccgtgtctcagcgcgaaaggttccagcgtgatgccaacctgggttcgctggtggcgttaaatgctttcttgagtactcagcctgctaatgtgccgcgtggtcaacaggattatactaactttttaagtgctttgagactgatggtatcagaagtacctcagagcgaagtgtatcagtccggtcctgattacttctttcagactagcagacagggcttgcagacggtaaatctgagccaagcttttaaaaaccttaaaggtttgtggggagtgcatgccccggtaggagaaagagcaaccgtgtctagcttgttaactccgaactcccgcctgttattactgttggtagctcctttcaccgacagcggtagcatcgaccgtaattcctatttgggttacctactaaacctgtatcgcgaagccatagggcaaagtcaggtggacgagcagacctatcaagaaattacccaagtcagtcgcgctttgggacaggaagacactggcagtttggaagccactctgaacttcttgcttaccaatcggtctcaaaagatccctcctcaatatgctcttactgcggaggaggagaggatccttagatatgtgcagcagagcgtgggattgtttctgatgcaagagggggcaactccgactgcagcactggacatgacagcgcgaaatatggagcccagcatgtatgccagtaaccgacctttcattaacaaactgctggactacttgcacagagctgccgctatgaactctgattatttcaccaatgccatcttaaacccgcactggctgcccccacctggtttctacacgggcgaatatgacatgcccgaccctaatgacggatttctgtgggacgacgtggacagcgatgttttttcacctctttctgatcatcgcacgtggaaaaaggaaggcggtgatagaatgcattcttctgcatcgctgtccggggtcatgggtgctaccgcggctgagcccgagtctgcaagtccttttcctagtctacccttttctctacacagtgtacgtagcagcgaagtgggtagaataagtcgcccgagtttaatgggcgaagaggagtacctaaacgattccttgctcagaccggcaagagaaaaaaatttcccaaacaatggaatagaaagtttggtggataaaatgagtagatggaagacttatgctcaggatcacagagacgagcctgggatcatggggactacaagtagagcgagccgtagacgccagcgccatgacagacagaggggtcttgtgtgggacgatgaggattcggccgatgatagcagcgtgttggacttgggtgggagaggaaggggcaacccgtttgctcatttgcgccctcgcttgggtggtatgttgtgaaaaaaaataaaaaagaaaaactcaccaaggccatggcgacgagcgtacgttcgttcttctttattatctgtgtctagtataatgaggcgagtcgtgctaggcggagcggtggtgtatccggagggtcctcctccttcgtacgagagcgtgatgcagcagcagcaggcgacggcggtgatgcaatccccactggaggctccctttgtgcctccgcgatacctggcacctacggagggcagaaacagcattcgttactcggaactggcacctcagtacgataccaccaggttgtatctggtggacaacaagtcggcggacattgcttctctgaactatcagaatgaccacagcaacttcttgaccacggtggtgcagaacaatgactttacccctacggaagccagcacccagaccattaactttgatgaacgatcgcggtggggcggtcagctaaagaccatcatgcatactaacatgccaaacgtgaacgagtatatgtttagtaacaagttcaaagcgcgtgtgatggtgtccagaaaacctcccgacggtgctgcagttggggatacttatgatcacaagcaggatattttggaatatgagtggttcgagtttactttgccagaaggcaacttttcagttactatgactattgatttgatgaacaatgccatcatagataattacttgaaagtgggtagacagaatggagtgcttgaaagtgacattggtgttaagttcgacaccaggaacttcaagctgggatgggatcccgaaaccaagttgatcatgcctggagtgtatacgtatgaagccttccatcctgacattgtcttactgcctggctgcggagtggattttaccgagagtcgtttgagcaaccttcttggtatcagaaaaaaacagccatttcaagagggttttaagattttgtatgaagatttagaaggtggtaatattccggccctcttggatgtagatgcctatgagaacagtaagaaagaacaaaaagccaaaatagaagctgctacagctgctgcagaagctaaggcaaacatagttgccagcgactctacaagggttgctaacgctggagaggtcagaggagacaattttgcgccaacacctgttccgactgcagaatcattattggccgatgtgtctgaaggaacggacgtgaaactcactattcaacctgtagaaaaagatagtaagaatagaagctataatgtgttggaagacaaaatcaacacagcctatcgcagttggtatctttcgtacaattatggcgatcccgaaaaaggagtgcgttcctggacattgctcaccacctcagatgtcacctgcggagcagagcaggtttactggtcgcttccagacatgatgaaggatcctgtcactttccgctccactagacaagtcagtaactaccctgtggtgggtgcagagcttatgcccgtcttctcaaagagcttctacaacgaacaagctgtgtactcccagcagctccgccagtccacctcgcttacgcacgtcttcaaccgctttcctgagaaccagattttaatccgtccgccggcgcccaccattaccaccgtcagtgaaaacgttcctgctctcacagatcacgggaccctgccgttgcgcagcagtatccggggagtccaacgtgtgaccgttactgacgccagacgccgcacctgtccctacgtgtacaaggcactgggcatagtcgcaccgcgcgtcctttcaagccgcactttctaaaaaaaaaatgtccattcttatctcgcccagtaataacaccggttggggtctgcgcgctccaagcaagatgtacggaggcgcacgcaaacgttctacccaacatcccgtgcgtgttcgcggacattttcgcgctccatggggtgccctcaagggccgcactcgcgttcgaaccaccgtcgatgatgtaatcgatcaggtggttgccgacgcccgtaattatactcctactgcgcctacatctactgtggatgcagttattgacagtgtagtggctgacgctcgcaactatgctcgacgtaagagccggcgaaggcgcattgccagacgccaccgagctaccactgccatgcgagccgcaagagctctgctacgaagagctagacgcgtggggcgaagagccatgcttagggcggccagacgtgcagcttcgggcgccagcgccggcaggtcccgcaggcaagcagccgctgtcgcagcggcgactattgccgacatggcccaatcgcgaagaggcaatgtatactgggtgcgtgacgctgccaccggtcaacgtgtacccgtgcgcacccgtccccctcgcacttagaagatactgagcagtctccgatgttgtgtcccagcggcgaggatgtccaagcgcaaatacaaggaagaaatgctgcaggttatcgcacctgaagtctacggccaaccgttgaaggatgaaaaaaaaccccgcaaaatcaagcgggttaaaaaggacaaaaaagaagaggaagatggcgatgatgggctggcggagtttgtgcgcgagtttgccccacggcgacgcgtgcaatggcgtgggcgcaaagttcgacatgtgttgagacctggaacttcggtggtctttacacccggcgagcgttcaagcgctacttttaagcgttcctatgatgaggtgtacggggatgatgatattcttgagcaggcggctgaccgattaggcgagtttgcttatggcaagcgtagtagaataacttccaaggatgagacagtgtcaatacccttggatcatggaaatcccacccctagtcttaaaccggtcactttgcagcaagtgttacccgtaactccgcgaacaggtgttaaacgcgaaggtgaagatttgtatcccactatgcaactgatggtacccaaacgccagaagttggaggacgttttggagaaagtaaaagtggatccagatattcaacctgaggttaaagtgagacccattaagcaggtagcgcctggtctgggggtacaaactgtagacattaagattcccactgaaagtatggaagtgcaaactgaacccgcaaagcctactgccacctccactgaagtgcaaacggatccatggatgcccatgcctattacaactgacgccgccggtcccactcgaagatcccgacgaaagtacggtccagcaagtctgttgatgcccaattatgttgtacacccatctattattcctactcctggttaccgaggcactcgctactatcgcagccgaaacagtacctcccgccgtcgccgcaagacacctgcaaatcgcagtcgtcgccgtagacgcacaagcaaaccgactcccggcgccctggtgcggcaagtgtaccgcaatggtagtgcggaacctttgacactgccgcgtgcgcgttaccatccgagtatcatcacttaatcaatgttgccgctgcctccttgcagatatggccctcacttgtcgccttcgcgttcccatcactggttaccgaggaagaaactcgcgccgtagaagagggatgttgggacgcggaatgcgacgctacaggcgacggcgtgctatccgcaagcaattgcggggtggttttttaccagccttaattccaattatcgctgctgcaattggcgcgataccaggcatagcttccgtggcggttcaggcctcgcaacgacattgacattggaaaaaaaacgtataaataaaaaaaaatacaatggactctgacactcctggtcctgtgactatgttttcttagagatggaagacatcaatttttcatccttggctccgcgacacggcacgaagccgtacatgggcacctggagcgacatcggcacgagccaactgaacgggggcgccttcaattggagcagtatctggagcgggcttaaaaattttggctcaaccataaaaacatacgggaacaaagcttggaacagcagtacaggacaggcgcttagaaataaacttaaagaccagaacttccaacaaaaagtagtcgatgggatagcttccggcatcaatggagtggtagatttggctaaccaggctgtgcagaaaaagataaacagtcgtttggacccgccgccagcaaccccaggtgaaatgcaagtggaggaagaaattcctccgccagaaaaacgaggcgacaagcgtccgcgtcccgatttggaagagacgctggtgacgcgcgtagatgaaccgccttcttatgaggaagcaacgaagcttggaatgcccaccactagaccgatagccccaatggccaccggggtgatgaaaccttctcagttgcatcgacccgtcaccttggatttgccccctccccctgctgctactgctgtacccgcttctaagcctgtcgctgccccgaaaccagtcgccgtagccaggtcacgtcccgggggcgctcctcgtccaaatgcgcactggcaaaatactctgaacagcatcgtgggtctaggcgtgcaaagtgtaaaacgccgtcgctgcttttaattaaatatggagtagcgcttaacttgcctatctgtgtatatgtgtcattacacgccgtcacagcagcagaggaaaaaaggaagaggtcgtgcgtcgacgctgagttactttcaagatggccaccccatcgatgctgccccaatgggcatacatgcacatcgccggacaggatgcttcggagtacctgagtccgggtctggtgcagttcgcccgcgccacagacacctacttcaatctgggaaataagtttagaaatcccaccgtagcgccgacccacgatgtgaccaccgaccgtagccagcggctcatgttgcgcttcgtgcccgttgaccgggaggacaatacatactcttacaaagtgcggtacaccctggccgtgggcgacaacagagtgctggatatggccagcacgttctttgacattaggggcgtgttggacagaggtcccagtttcaaaccctattctggtacggcttacaactctctggctcctaaaggcgctccaaatgcatctcaatggattgcaaaaggcgtaccaactgcagcagccgcaggcaatggtgaagaagaacatgaaacagaggagaaaactgctacttacacttttgccaatgctcctgtaaaagccgaggctcaaattacaaaagagggcttaccaataggtttggagatttcagctgaaaacgaatctaaacccatctatgcagataaactttatcagccagaacctcaagtgggagatgaaacttggactgacctagacggaaaaaccgaagagtatggaggcagggctctaaagcctactactaacatgaaaccctgttacgggtcctatgcgaagcctactaatttaaaaggtggtcaggcaaaaccgaaaaactcggaaccgtcgagtgaaaaaattgaatatgatattgacatggaattttttgataactcatcgcaaagaacaaacttcagtcctaaaattgtcatgtatgcagaaaatgtaggtttggaaacgccagacactcatgtagtgtacaaacctggaacagaagacacaagttccgaagctaatttgggacaacagtctatgcccaacagacccaactacattggcttcagagataactttattggactcatgtactataacagtactggtaacatgggggtgctggctggtcaagcgtctcagttaaatgcagtggttgacttgcaggacagaaacacagaactttcttaccaactcttgcttgactctctgggcgacagaaccagatactttagcatgtggaatcaggctgtggacagttatgatcctgatgtacgtgttattgaaaatcatggtgtggaagatgaacttcccaactattgttttccactggacggcataggtgttccaacaaccagttacaaatcaatagttccaaatggagaagataataataattggaaagaacctgaagtaaatggaacaagtgagatcggacagggtaatttgtttgccatggaaattaaccttcaagccaatctatggcgaagtttcctttattccaatgtggctctgtatctcccagactcgtacaaatacaccccgtccaatgtcactcttccagaaaacaaaaacacctacgactacatgaacgggcgggtggtgccgccatctctagtagacacctatgtgaacattggtgccaggtggtctctggatgccatggacaatgtcaacccattcaaccaccaccgtaacgctggcttgcgttaccgatctatgcttctgggtaacggacgttatgtgcctttccacatacaagtgcctcaaaaattcttcgctgttaaaaacctgctgcttctcccaggctcctacacttatgagtggaactttaggaaggatgtgaacatggttctacagagttccctcggtaacgacctgcgggtagatggcgccagcatcagtttcacgagcatcaacctctatgctacttttttccccatggctcacaacaccgcttccacccttgaagccatgctgcggaatgacaccaatgatcagtcattcaacgactacctatctgcagctaacatgctctaccccattcctgccaatgcaaccaatattcccatttccattccttctcgcaactgggcggctttcagaggctggtcatttaccagactgaaaaccaaagaaactccctctttggggtctggatttgacccctactttgtctattctggttctattccctacctggatggtaccttctacctgaaccacacttttaagaaggtttccatcatgtttgactcttcagtgagctggcctggaaatgacaggttactatctcctaacgaatttgaaataaagcgcactgtggatggcgaaggctacaacgtagcccaatgcaacatgaccaaagactggttcttggtacagatgctcgccaactacaacatcggctatcagggcttctacattccagaaggatacaaagatcgcatgtattcatttttcagaaacttccagcccatgagcaggcaggtggttgatgaggtcaattacaaagacttcaaggccgtcgccataccctaccaacacaacaactctggctttgtgggttacatggctccgaccatgcgccaaggtcaaccctatcccgctaactatccctatccactcattggaacaactgccgtaaatagtgttacgcagaaaaagttcttgtgtgacagaaccatgtggcgcataccgttctcgagcaacttcatgtctatgggggcccttacagacttgggacagaatatgctctatgccaactcagctcatgctctggacatgacctttgaggtggatcccatggatgagcccaccctgctttatcttctcttcgaagttttcgacgtggtcagagtgcatcagccacaccgcggcatcatcgaggcagtctacctgcgtacaccgttctcggccggtaacgctaccacgtaagaagcttcttgcttcttgcaaatagcagctgcaaccatggcctgcggatcccaaaacggctccagcgagcaagagctcagagccattgtccaagacctgggttgcggaccctattttttgggaacctacgataagcgcttcccggggttcatggcccccgataagctcgcctgtgccattgtaaatacggccggacgtgagacggggggagagcactggttggctttcggttggaacccacgttctaacacctgctacctttttgatccttttggattctcggatgatcgtctcaaacagatttaccagtttgaatatgagggtctcctgcgccgcagcgctcttgctaccaaggaccgctgtattacgctggaaaaatctacccagaccgtgcagggcccccgttctgccgcctgcggacttttctgctgcatgttccttcacgcctttgtgcactggcctgaccgtcccatggacggaaaccccaccatgaaattgctaactggagtgccaaacaacatgcttcattctcctaaagtccagcccaccctgtgtgacaatcaaaaagcactctaccattttcttaatacccattcgccttattttcgctctcatcgtacacacatcgaaagggccactgcgttcgaccgtatggatgttcaataatgactcatgtaaacaacgtgttcaataaacatcactttatttttttacatgtatcaaggctctggattacttatttatttacaagtcgaatgggttctgacgagaatcagaatgacccgcaggcagtgatacgttgcggaactgatacttgggttgccacttgaattcgggaatcaccaacttgggaaccggtatatcgggcaggatgtcactccacagctttctggtcagctgcaaagctccaagcaggtcaggagccgaaatcttgaaatcacaattaggaccagtgctctgagcgcgagagttgcggtacaccggattgcagcactgaaacaccatcagcgacggatgtctcacgcttgccagcacggtgggatctgcaatcatgcccacatccagatcttcagcattggcaatgctgaacggggtcatcttgcaggtctgcctacccatggcgggcacccaattaggcttgtggttgcaatcgcagtgcagggggatcagtatcatcttggcctgatcctgtctgattcctggatacacggctctcatgaaagcatcatattgcttgaaagcctgctgggctttactaccctcgggataaaacatcccgcaggacctgctcgaaaactggttagcctgcacagccggcatcattcacacagcagcgggcgtcattgttggctatttgcaccacacttctgccccagcggttttgggtgattttggttcgctcgggattctcctttaaggctcgttgtccgttctcgctggccacatccatctcgataatctgctccttctgaatcataatattgccatgcaggcacttcagcttgccctcataatcattgcagccatgaggccacaacgcacagcctgtacattcccaattatggtgggcgatctgagaaaaagaatgtatcattccctgcagaaatcttcccatcatcgtgctcagtgtcttgtgactagtgaaagttaactggatgcctcggtgctcttcgtttacgtactggtgacagatgcgcttgtattgttcgtgttgctcaggcattagtttaaaacaggttctaagttcgttatccagcctgtacttctccatcagcagacacatcacttccatgcctttctcccaagcagacaccaggggcaagctaatcggattcttaacagtgcaggcagcagctcctttagccagagggtcatctttagcgatcttctcaatgcttcttttgccatccttctcaacgatgcgcacgggcgggtagctgaaacccactgctacaagttgcgcctcttctctttcttcttcgctgtcttgactgatgtcttgcatggggatatgtttggtcttccttggcttctttttggggggtatcggaggaggaggactgtcgctccgttccggagacagggaggattgtgacgtttcgctcaccattaccaactgactgtcggtagaagaacctgaccccacacggcgacaggtgtttttcttcgggggcagaggtggaggcgattgcgaagggctgcggtccgacctggaaggcggatgactggcagaaccccttccgcgttcgggggtgtgctccctgtggcggtcgcttaactgatttccttcgcggctggccattgtgttctcctaggcagagaaacaacagacatggaaactcagccattgctgtcaacatcgccacgagtgccatcacatctcgtcctcagcgacgaggaaaaggagcagagcttaagcattccaccgcccagtcctgccaccacctctaccctagaagataaggaggtcgacgcatctcatgacatgcagaataaaaaagcgaaagagtctgagacagacatcgagcaagacccgggctatgtgacaccggtggaacacgaggaagagttgaaacgctttctagagagagaggatgaaaactgcccaaaacagcgagcagataactatcaccaagatgctggaaatagggatcagaacaccgactacctcatagggcttgacggggaagacgcgctccttaaacatctagcaagacagtcgctcatagtcaaggatgcattattggacagaactgaagtgcccatcagtgtggaagagctcagctgcgcctacgagcttaaccttttttcacctcgtactccccccaaacgtcagccaaacggcacctgcgagccaaatcctcgcttaaacttttatccagcttttgctgtgccagaagtactggctacctatcacatcttttttaaaaatcaaaaaattccagtctcctgccgcgctaatcgcacccgcgccgatgccctactcaatctgggacctggttcacgcttacctgatatagcttccttggaagaggttccaaagatcttcgagggtctgggcaataatgagactcgggccgcaaatgctctgcaaaagggagaaaatggcatggatgagcatcacagcgttctggtggaattggaaggcgataatgccagactcgcagtactcaagcgaagcgtcgaggtcacacacttcgcatatcccgctgtcaacctgccccctaaagtcatgacggcggtcatggaccagttactcattaagcgcgcaagtcccctttcagaagacatgcatgacccagatgcctgtgatgagggtaaaccagtggtcagtgatgagcagctaacccgatggctgggcaccgactctccccgggatttggaagagcgtcgcaagcttatgatggccgtggtgctggttaccgtagaactagagtgtctccgacgtttctttaccgattcagaaaccttgcgcaaactcgaagagaatctgcactacacttttagacacggctttgtgcggcaggcatgcaagatatctaacgtggaactcaccaacctggtttcctacatgggtattctgcatgagaatcgcctaggacaaagcgtgctgcacagcacccttaagggggaagcccgccgtgattacatccgcgattgtgtctatctctacctgtgccacacgtggcaaaccggcatgggtgtatggcagcaatgtttagaagaacagaacttgaaagagcttgacaagctcttacagaaatctcttaaggttctgtggacagggttcgacgagcgcaccgtcgcttccgacctggcagacctcatcttcccagagcgtctcagggttactttgcgaaacggattgcctgactttatgagccagagcatgcttaacaattttcgctctttcatcctggaacgctccggtatcctgcccgccacctgctgcgcactgccctccgactttgtgcctctcacctaccgcgagtgccccccgccgctatggagtcactgctacctgttccgtctggccaactatctctcctaccactcggatgtgatcgaggatgtgagcggagacggcttgctggagtgccactgccgctgcaatctgtgcacgccccaccggtccctagcttgcaacccccagttgatgagcgaaacccagataataggcacctttgaattgcaaggccccagcagccaaggcgatgggtcttctcctgggcaaagtttaaaactgaccccgggactgtggacctccgcctacttgcgcaagtttgctccggaagattaccacccctatgaaatcaagttctatgaggaccaatcacagcctccaaaggccgaactttcggcttgcgtcatcacccagggggcaattctggcccaattgcaagccatccaaaaatcccgccaagaatttctactgaaaaagggtaagggggtctaccttgacccccagaccggcgaggaactcaacacaaggttccctcaggatgtcccaacgacgagaaaacaagaagttgaaggtgcagccgccgcccccagaagatatggaggaagattgggacagtcaggcagaggaggcggaggaggacagtctggaggacagtctggaggaagacagtttggaggaggaaaacgaggaggcagaggaggtggaagaagtaaccgccgacaaacagttatcctcggctgcggagacaagcaacagcgctaccatctccgctccgagtcgaggaacccggcggcgtcccagcagtagatgggacgagaccggacgcttcccgaacccaaccagcgcttccaagaccggtaagaaggatcggcagggatacaagtcctggcgggggcataagaatgccatcatctcctgcttgcatgagtgcgggggcaacatatccttcacgcggcgctacttgctattccaccatggggtgaactttccgcgcaatgttttgcattactaccgtcacctccacagcccctactatagccagcaaatcccgacagtctcgacagataaagacagcggcggcgacctccaacagaaaaccagcagcggcagttagaaaatacacaacaagtgcagcaacaggaggattaaagattacagccaacgagccagcgcaaacccgagagttaagaaatcggatctttccaaccctgtatgccatcttccagcagagtcggggtcaagagcaggaactgaaaataaaaaaccgatctctgcgttcgctcaccagaagttgtttgtatcacaagagcgaagatcaacttcagcgcactctcgaggacgccgaggctctcttcaacaagtactgcgcgctgactcttaaagagtaggcagcgaccgcgcttattcaaaaaaggcgggaattacatcatcctcgacatgagtaaagaaattcccacgccttacatgtggagttatcaaccccaaatgggattggcagcaggcgcctcccaggactactccacccgcatgaattggctcagcgccgggccttctatgatttctcgagttaatgatatacgcgcctaccgaaaccaaatacttttggaacagtcagctcttaccaccacgccccgccaacaccttaatcccagaaattggcccgccgccctagtgtaccaggaaagtcccgctcccaccactgtattacttcctcgagacgcccaggccgaagtccaaatgactaatgcaggtgcgcagttagctggcggctccaccctatgtcgtcacaggcctcggcataatataaaacgcctgatgatcagaggccgaggtatccagctcaacgacgagtcggtgagctctccgcttggtctacgaccagacggaatctttcagattgccggctgcgggagatcttccttcacccctcgtcaggctgttctgactttggaaagttcgtcttcgcaaccccgctcgggcggaatcgggaccgttcaatttgtagaggagtttactccctctgtctacttcaaccccttctccggatctcctgggcactacccggacgagttcataccgaacttcgacgcgattagcgagtcagtggacggctacgattgatgtctggtgacgcggctgagctatctcggctgcgacatctagaccactgccgccgctttcgctgctttgcccgggaacttattgagttcatctacttcgaactccccaaggatcaccctcaaggtccggcccacggagtgcggattactatcgaaggcaaaatagactctcgcctgcaacgaattttctcccagcggcccgtgctgatcgagcgagaccagggaaacaccacggtttccatctactgcatttgtaatcaccccggattgcatgaaagcctttgctgtcttatgtgtactgagtttaataaaaactgaattaagactctcctacggactgccgcttcttcaacccggattttacaaccagaagaacaaaacttttcctgtcgtccaggactctgttaacttcacctttcctactcacaaactagaagctcaacgactacaccgcttttccagaagcattttccctactaatactactttcaaaaccggaggtgagctccacggtctccctacagaaaacccttgggtggaagcgggccttgtagtactaggaattcttgcgggtgggcttgtgattattctttgctacctatacacaccttgcttcactttcctagtggtgttgtggtattggtttaaaaaatggggcccatactagtcttgcttgttttactttcgcttttggaaccgggttctgccaattacgatccatgtctagactttgacccagaaaactgcacacttacttttgcacccgacacaagccgcatctgtggagttcttattaagtgcggatgggaatgcaggtccgttgaaattacacacaataacaaaacctggaacaataccttatccaccacatgggagccaggagttcccgagtggtacactgtctctgtccgaggtcctgacggttccatccgcattagtaacaacactttcattttttctgaaatgtgcgatctggccatgttcatgagcaaacagtattctctatggcctcctagcaaggacaacatcgtaacgttctccattgcttattgcttgtgcgcttgccttcttactgctttactgtgcgtatgcatacacctgcttgtaaccactcgcatcaaaaacgccaataacaaagaaaaaatgccttaacctctttctgtttacagacatggcttctcttacatctctcatatttgtcagcattgtcactgccgctcacggacaaacagtcgtctctatcccactaggacataattacactctcataggacccccaatcacttcagaggtcatctggaccaaactgggaagcgttgattactttgatataatctgtaacaaaacaaaaccaataatagtaacttgcaacatacaaaatcttacattgattaatgttagcaaagtttacagcggttactattatggttatgacagatacagtagtcaatatagaaattacttggttcgtgttacccagttgaaaaccacgaaaatgccaaatatggcaaagattcgatccgatgacaattctctagaaacttttacatctcccaccacacccgacgaaaaaaacatcccagattcaatgattgcaattgttgcagcggtggcagtggtgatggcactaataataatatgcatgcttttatatgcttgtcgctacaaaaagtttcatcctaaaaaacaagatctcctactaaggcttaacatttaatttctttttatacagccatggtttccactaccacattccttatgcttactagtctcgcaactctgacttctgctcgctcacacctcactgtaactataggctcaaactgcacactaaaaggacctcaaggtggtcatgtcttttggtggagaatatatgacaatggatggtttacaaaaccatgtgaccaacctggtagatttttctgcaacggcagagacctaaccattatcaacgtgacagcaaatgacaaaggcttctattatggaaccgactataaaagtagtttagattataacattattgtactgccatctaccactccaccaccccgcacaactactttctctagcagcagtgtcgctaacaatacaatttccaatccaacctttgccgcgcttttaaaacgcactgtgaataattctacaacttcacatacaacaatttccacttcaacaatcagcatcatcgctgcagtgacaattggaatatctattcttgtttttaccataacctactacgcctgctgctatagaaaagacaaacataaaggtgatccattacttagatttgatatttaatttgttctttttttttatttacagtatggtgaacaccaatcatggtacctagaaatttcttcttcaccatactcatctgtgcttttaatgtttgcgctactttcacagcagtagccacagcaaccccagactgtataggagcatttgcttcctatgcactttttgcttttgttacttgcatctgcgtatgtagcatagtctgcctggttattaattttttccaacttctagactggatccttgtgcgaattgcctacctgcgccaccatcccgaataccgcaaccaaaatatcgcggcacttcttagactcatctaaaaccatgcaggctatactaccaatatttttgcttctattgcttccctacgctgtctcaaccccagctgcctatagtactccaccagaacaccttagaaaatgcaaattccaacaaccgtggtcatttcttgcttgctatcgagaaaaatcagaaatccccccaaatttaataatgattgctggaataattaatataatctgttgcaccataatttcatttttgatataccccctatttgattttggctggaatgctcccaatgcacatgatcatccacaagacccagaggaacacattcccccacaaaacatgcaacatccaatagcgctaatagattacgaaagtgaaccacaacccccactactccctgctattagttacttcaacctaaccggcggagatgactgaaacactcaccacctccaattccgccgaggatctgctcgatatggacggccgcgtctcagaacaacgacttgcccaactacgcatccgccagcagcaggaacgcgtggccaaagagctcagagatgtcatccaaattcaccaatgcaaaaaaggcatattctgtttggtaaaacaagccaagatatcctacgagatcaccgctactgaccatcgcctctcttacgaacttggcccccaacgacaaaaatttacctgcatggtgggaatcaaccccatagttatcacccaacaaagtggagatactaagggttgcattcactgttcctgcgattccatcgagtgcacctacaccctgctgaagaccctatgcggcctaagagacctgctaccaatgaattaaaaaaaaatgattaataaaaaatcacttacttgaaatcagcaataaggtctctgttgaaattttctcccagcagcacctcacttccctcttcccaactctggtattctaaaccccgttcagcggcatactttctccatactttaaaggggatgtcaaattttagctcctctcctgtacccacaatcttcatgtctttcttcccagatgaccaagagagtccggctcagtgactccttcaaccctgtctacccctatgaagatgaaagcacctcccaacaccccttttataacccagggtttatttccccaaatggcttcacacaaagcccagacggagttcttactttaaaatgtttaaccccactaacaaccacaggcggatctctacagctaaaagtgggagggggacttacagtggatgacactgatggtaccttacaagaaaacatacgtgctacagcacccattactaaaaataatcactctgtagaactatccattggaaatggattagaaactcaaaacaataaactatgtgccaaattgggaaatgggttaaaatttaacaacggtgacatttgtataaaggatagtattaacaccttatggactggaataaaccctccacctaactgtcaaattgtggaaaacactaatacaaatgatggcaaacttactttagtattagtaaaaaatggagggcttgttaatggctacgtgtctctagttggtgtatcagacactgtgaaccaaatgttcacacaaaagacagcaaacatccaattaagattatattttgactcttctggaaatctattaactgaggaatcagacttaaaaattccacttaaaaataaatcttctacagcgaccagtgaaactgtagccagcagcaaagcctttatgccaagtactacagcttatcccttcaacaccactactagggatagtgaaaactacattcatggaatatgttactacatgactagttatgatagaagtctatttcccttgaacatttctataatgctaaacagccgtatgatttcttccaatgttgcctatgccatacaatttgaatggaatctaaatgcaagtgaatctccagaaagcaacatagctacgctgaccacatccccctttttcttttcttacattacagaagacgacaactaaaataaagtttaagtgtttttatttaaaatcacaaaattcgagtagttattttgcctccaccttcccatttgacagaatacaccaatctctccccacgcacagctgttaaacatttggataccattagagatagacattgttttagattccacattccaaacagtttcagagcgagccaatctggggtcagtgatagataaaaatccatcgcgatagtcttttaaagcgctttcacagtccaactgctgcggatgcgactccggagtttggatcacggtcatctggaagaagaacgatgggaatcataatccgaaaacggtatcggacgattgtgtctcatcaaacccacaagcagccgctgtctgcgtcgctccgtgcgactgctgtttatgggatcagggtccacagtttcctgaagcatgattttaatagcccttaacatcaactttctggtgcgatgcgcgcagcaacgcattctgatttcactcaaatctttgcagtaggtacaacacattattacaatattgtttaataaaccataattaaaagcgctccagccaaaactcatatctgatataatcgcccctgcatgaccatcataccaaagtttaatataaattaaatgacgttccctcaaaaacacactacccacatacatgatctcttttggcatgtgcatattaacaatctgtctgtaccatggacaacgttggttaatcatgcaacccaatataaccttccggaaccacactgccaacaccgctcccccagccatgcattgaagtgaaccctgctgattacaatgacaatgaagaacccaattctctcgaccgtgaatcacttgagaatgaaaaatatctatagtggcacaacatagacataaatgcatgcatcttctcataatttttaactcctcaggatttagaaacatatcccagggaataggaagctcttgcagaacagtaaagctggcagaacaaggaagaccacgaacacaacttacactatgcatagtcatagtatcacaatctggcaacagcgggtggtcttcagtcatagaagctcgggtttcattttcctcacaacgtggtaactgggctctggtgtaagggtgatgtctggcgcatgatgtcgagcgtgcgcgcaaccttgtcataatggagttgcttcctgacattctcgtattttgtatagcaaaacgcggccctggcagaacacactcttcttcgccttctatcctgccgcttagcgtgttccgtgtgatagttcaagtacagccacactcttaagttggtcaaaagaatgctggcttcagttgtaatcaaaactccatcgcatctaattgttctgaggaaatcatccacggtagcatatgcaaatcccaaccaagcaatgcaactggattgcgtttcaagcaggagaggagagggaagagacggaagaaccatgttaatttttattccaaacgatctcgcagtacttcaaattgtagatcgcgcagatggcatctctcgcccccactgtgttggtgaaaaagcacagctaaatcaaaagaaatgcgattttcaaggtgctcaacggtggcttccaacaaagcctccacgcgcacatccaagaacaaaagaataccaaaagaaggagcattttctaactcctcaatcatcatattacattcctgcaccattcccagataattttcagctttccagccttgaattattcgtgtcagttcttgtggtaaatccaatccacacattacaaacaggtcccggagggcgccctccaccaccattcttaaacacaccctcataatgacaaaatatcttgctcctgtgtcacctgtagcgaattgagaatggcaacatcaattgacatgcccttggctctaagttcttctttaagttctagttgtaaaaactctctcatattatcaccaaactgcttagccagaagccccccgggaacaagagcaggggacgctacagtgcagtacaagcgcagacctccccaattggctccagcaaaaacaagattggaataagcatattgggaaccaccagtaatatcatcgaagttgctggaaatataatcaggcagagtttcttgtagaaattgaataaaagaaaaatttgccaaaaaaacattcaaaacctctgggatgcaaatgcaataggttaccgcgctgcgctccaacattgttagttttgaattagtctgcaaaaataaaaaaaaaacaagcgtcatatcatagtagcctgacgaacaggtggataaatcagtctttccatcacaagacaagccacagggtctccagctcgaccctcgtaaaacctgtcatcgtgattaaacaacagcaccgaaagttcctcgcggtgaccagcatgaataagtcttgatgaagcatacaatccagacatgttagcatcagttaaggagaaaaaacagccaacatagcctttgggtataattatgcttaatcgtaagtatagcaaagccacccctcgcggatacaaagtaaaaggcacaggagaataaaaaatataattatttctctgctgctgtttaggcaacgtcgcccccggtccctctaaatacacatacaaagcctcatcagccatggcttaccagagaaagtacagcgggcacacaaaccacaagctctaaagtcactctccaacctctccacaatatatatacacaagccctaaactgacgtaatgggactaaagtgtaaaaaatcccgccaaacccaacacacaccccgaaactgcgtcaccagggaaaagtacagtttcacttccgcaatcccaacaagcgtcacttcctctttctcacggtacgtcacatcccattaacttacaacgtcattttcccacggccgcgccgccccttttaaccgttaaccccacagccaatcaccacacggcccacactttttaaaatcacctcatttacatattggcaccattccatctataaggtatattattgatgatg

SEQ ID NO: 272 - DNA, 35514 bp, Human adenovirus
  misc_feature 1..35514: note = Human adenovirus 7, NCBI Accession No. AC_000018
  source 1..35514: mol_type = genomic DNA
ctctctatttaatataccttatagatggaatggtgccaatatgtaaatgaggtaatttaaaaaagtgcgcgctgtgtggtgattggctgtggggttaacggctaaaatgggcggggcggccgtgggaaaatgacgtgacttatgtgggaggagctatgttgcaagttattgcggtaaatgtgacgtaaaacgaggtgtggtttgaacacggaagtagacagttttcccacgcttactgacaggatatgaggtagttttgggcggatgcaagtaaaaattctccattttcgcgcgaaaactgaatgaggaagtgaatttctgagtcatttcgcggttatgacagggtggagtatttgccgagggccgagtagactttgaccgtttacgtggaggtttcgattaccgtgtttttcacctaaatttccgcgtacggtgtcaaagtcctgtgtttttacgtaggtgtcagctgatcgctagggtatttaaacctgacgagttccgtcaagaggccactcttgagtgccagcgagaagagttttctccttcgcgccgcaagtcagttctgcgctttgaaaatgagacacctgcgtttcctgccacaggagattatcttcagtgagaccgggatcgaaatactggagtttgtggtaaataccctaatgggagacgacccggaaccgccagtgcagcctttcgatccacctacgctgcacgatctgtatgatttagaggtagacgggcctcaggatcccaatgaggaagctgtgaatgggttttttactgattctatgctgctagctgccgatgaaggattggacataaaccctcctcctgagacccttgttaccccaggggtggttgtggaaagcggcagaggtgggaaaaaattgcctgatctgggagcagctgaaatggacttgcgttgttatgaagagggttttcctccgagtgatgatgaagatggggaaactgagcagtccatccataccgcagtgaatgagggagtaaaagctgccagcgatgtttttaagttggactgtccggagctgcctggacatggctgtaagtcttgtgaatttcacaggaataacactggaatgaaagaactattgtgctcgctttgctatatgagaatgcactgccactttatttacagtaagtgtatttaagtgaaatttaaaggaatagtgtagctgtttaataactgttgaatggtagatttatgttttttacttgtgattttttgtaggtcctgtgtctgatgatgagtcaccttctcctgattcaactacctcacctcctgaaattcaggcgcccgcacctgcaaacgtatgcaagcccattcctgtaaagcctaagcctgggaaacgccctgctgtggataagcttgaggacttgttggagggtggggatggacctttggaccttagtacccggaaactgccaaggcaataagtgccctgcagctgtgtttatttaatgtgacgtcatgtaataaaattatgtcagctgctgagtgttttattacttcttgggtggggacttggatatataagtaggagcagatctgtgtggttagctcacagcaacctgctgccatccatggaggtttgggctatcttggaagacctcagacagactaggctactgctagaaaacgcctcggacggagtctctggcctttggagattctggttcggtggtgatctagctaggctagtgtttaggataaaacaggactacagcgtagaatttgaaaagttattggacgacagtccaggactttttgaagctcttaacttgggtcatcaggctcattttaaggagaaggttttatcagttttagatttttctactcctggtagaactgctgctgctgtagcttttcttacttttatattggataaatggatccgccaaactcacttcagcaagggatacgttttggatttcatagcagcagctttgtggagaacatggaaggctcgcaggatgaggacaatcttagattactggccagtgcagcctctaggagtagcagggatactgagacacccaccgaccatgccagcggttctgcaggaggagcagcaggaggacaatccgagagccggcctggaccctccggtggaggagtagctgacctgtttcctgaactgcgacgggtgcttactaggtctacgaccagtggacagaacagaggcattaagagggagaggaatcctagtgggaataattcaagaaccgagttggctttaagtttaatgagccgcaggcgtcctgaaactgtttggtggcatgaggttcagagcgaaggcagggatgaagtttcaatattgcaggagaaatattcactagaacaacttaagacctgttggttggaacctgaggatgattgggaggtggccattaggaattatgctaagatatctctgaggcctgataaacaatatagaattactaagaagattaatattagaaatgcatgctacatatcagggaatggggcagaggttataatagatacacaagataaagcagcttttagatgttgtatgatgggtatgtggccaggggttgtcggcatggaagcagtaacacttatgaatattaggtttagaggggatgggtataatggcattgtatttatggctaacactaagctgattctacatggttgtagcttttttgggtttaataatacgtgtgtagaagcttgggggcaagttagtgtgaggggttgtagtttttatgcatgctggattgcaacatcaggtagggtcaagagtcagttgtctgtgaagaaatgcatgtttgagagatgtaatcttggcatactgaatgaaggtgaagcaaggatccgccactgcgcagctacagaaactggctgcttcattctaataaagggaaatgccagtgtgaagcataatatgatctgtggacattcggatgagaggccttatcagatgctgacctgcgctggtggacattgcaatattcttgctactgtgcatatcgtttcacatgcacgcaagaaatggcctgtatttgaacataatgtgattaccaagtgcaccatgcacataggtggtcgcaggggaatgtttatgccttaccagtgtaacatgaatcatgtgaaggtaatgttggaaccagatgccttttccagagtgagcttaacaggaatctttgatatgaatattcaactatggaagatcctgagatatgatgacactaaaccgagggtgcgcgcatgcgaatgcggaggcaagcatgctagattccagccggtgtgcgtggatgtgactgaagacctgagacccgatcatttggtgcttgcctgcactggagcggagttcggttccagtggtgaagaaactgactaaagtgagtagtgggggcaagatgtggatggggactttcaggttggtaaggtggacagattgggtaaattttgttaatttctgtcttgcagctgccatgagtggaagcgcttcttttgaggggggagtatttagcccttatctgacgggcaggctcccaccatgggcaggagttcgtcagaatgtcatgggatccactgtggatgggagacccgtccagcccgccaattcctcaacgctgacctatgccactttgagttcgtcaccattggatgcagctgcagccgccgccgctactgctgccgccaacactatccttggaatgggctattacggaagcatcgttgccaattccagttcctctaataacccttcaaccctggctgaggacaagctacttgttctgttggctcagctcgaggccttaacccaacgcttaggcgaactgtctaagcaggtggcccagttgcgtgagcaaactgagtctgctgttgctacagcaaagtctaaataaagatctcaaatcaataaataaagaaatacttgttataaaaacaaatgaatgtttatttgatttttcgcgcgcggtatgccctggaccatcggtctcgatcattgagaactcggtggatcttttccagtaccctgtaaaggtgggattgaatgtttagatacataggcattagtccgtctcgggggtggagatagctccattgaagagcctcttgctccggggtagtgttataaatcacccagtcatagcaaggtcggagtgcatggtgttgcacaatatcttttaggagcagactaattgcaacggggaggcccttagtgtaggtgtttacaaatctattgagctgggacgggtacatccggggtgaaattatatgcattttggactggatcttgaggttggcaatgttgccgcctagatcccgtctcgggttcatattgtgcaggaccactaagacagtgtatccggtgcacttgggaaatttatcatgcagcttagagggaaaagcatgaaaaaatttggagacgcctttgtgaccccccagattctccatgcactcatccataatgatagcgatggggccgtgggcagcggcacgggcgaacacgttccgggggtctgaaacatcatagttatgctcctgagtcaggtcatcataagccattttaataaactttgggcggagggtgccagattgggggatgaaagttccctctggcccgggagcatagttcccctcacatatttgcatttcccaggctttcagttcagagggggggatcatgtccacctgcggggctataaaaaataccgtttctggagccggggtgattaactgggatgagagcaaattcctaagcagctgagacttgccgcacccagtgggaccgtaaatgaccccaattacgggttgcagatggtagtttagggagcgacagctgccgtcctcccggagtaggggggccacttcgttcatcatttcccttacatggatattttcccgcaccaagtccgttaggaggcgctctcccccaagggatagaagctcctggagcgaggagaagtttttcagcggcttcagcccgtcagccatgggcattttggaaagagtctgttgcaagagctcgagccggtcccagagctcggtgatgtgctctatggcatctcgatccagcagacctcctcgtttcgcgggttgggacggctcctggagtagggaatcagacgatgggcgtccagcgctgccagggtccgatccttccatggtcgcagcgtccgagtcagggttgtttccgtcacggtgaatgggtgcgcgcctggttgggcgcttgcgagggtgcgcttcagactcatcctgctggtcgagaaccgctgccgatcggcgccctgcatgtcggccaggtagcagtttaccatgagttcgtagttgagcgcctcggccgcgtggcctttggcacggagcttacctttggaagttttatggcaggcggggcagtagatacatttgagggcatacagcttgggcgcgaggaaaatggattcgggggagtatgcatccgcaccgcaggaggcgcagacggtttcgcactccacgagccaggtcagatccggctcatcggggtcaaaaacaagttttccgccatgttttttgatgcgtttcttacctttggtttccatgaggtcgtgtccccgctgggtgacaaagaggctgtccgtgtccccgtagaccgactttatgggcctgtcctcgagcggagtgcctcggtcctcttcgtagaggaacccagcccactctgatacaaaagcgcgtgtccaggccagcacaaaggaggccacgtgggaggggtagcggtcgttgtcaaccagggggtccaccttctctacggtatgtaaacacatgtccccctcctccacatccaagaatgtgattggcttgtaagtgtaggccacgtgaccaggggtccccgccgggggggtataaaagggggcgggcctctgttcgtcctcactgtcttccggatcgctgtccaggagcgccagctgttggggtaggtattccctctcgaaggcgggcatgacctctgcactcaggttgtcagtttctaggaacgaggaggatttgatattgacagtaccagcagagatgcctttcataagactctcgtccatctggtcagaaaacacaatcttcttgttgtccagcttggtagcaaatgatccatagagggcattggatagaagcttggcgatggagcgcatggtttggttcttttccttgtccgcgcgctccttggcggcgatgttaagctggacgtactcgcgcgccacacatttccattcagggaagatggttgtcagttcatccggaactattctgactcgccatcccctattgtgcagggttatcagatccacactggtggccacctcgcctcggaggggctcattggtccagcagagtcgacctccttttcttgaacagaaaggggggagggggtctagcatgagctcatcaggggggtccgcatctatggtaaatattcccggtagcaaatctttgtcaaaatagctgatggtggtgggatcatccaaggtcatctgccattctcgaactgccagcgcgcgctcataggggttaagaggggtgccccagggcatggggtgggtgagcgcggaggcatacatgccacagatatcgtatacatagaggggctcttcgaggatgccgatgtaagtgggataacagcgcccccctctgatgcttgctcgcacatagtcatagagttcatgtgagggggcgagaagacccgggcccagattggtgcggttgggtttttccgccctgtaaacgatctggcgaaagatggcatgggaatttgaagagatagtaggtctctggaatatgttaaaatgggcatgaggtaggcctacagagtcccttatgaagtgggcatatgactcttgcagcttggctaccagctcggcggtgacgagtacatccagggcacagtagtcgagagtttcctggatgatgtcataacgcggttggcttttcttttcccacagctcgcggttgagaaggtattcttcgcgatccttccagtactcttcgaggggaaacccgtctttttctgcacggtaagagcccaacatgtagaactgattgactgccttgtagggacagcatcccttctccactgggagagagtatgcttgggctgcattgcgcagcgaggtatgagtgagggcaaaagtgtccctgaccatgactttgaggaattgatacttgaagtccatgtcatcacaggccccctgttcccagagttggaagtccacccgcttcttgtaggcggggttgggcaaagcgaaagtaacatcattgaagaggatcttgccggccctgggcatgaaatttcgggtgattctgaaaggctgagggacctctgctcggttattgataacctgagcggccaagacgatctcatcaaagccattgatgttgtgccccactatgtacagttctaagaatcgaggggtgcccctgacatgaggcagcttcttgagttcttcaaaagtgagatctgtagggtcagtgagagcatagtgttcgagggcccattcgtgcacgtgagggttcgctttgaggaaggaggaccagaggtccactgcgagtgctgtttgtaactggtcccggtattgacgaaaatgctgcccgactgccattttttctggggtgacgcaatagaaggtttgggggtcctgccgccagcgatcccacttaagtttcatggcgaggtcataggcgatgttgacgagccgctggtctccagagagtttcatgaccagcatgaaggggattagctgcttgccaaaggaccccatccaggtgtaggtttccacatcgtaggtgaggaagagcctttctgtgcgaggatgagagccaatcgggaagaactggatctcctgccaccagttggaggaatggctgttgatgtgatggaagtagaactccctgcgacgcgccgagcattcatgcttgtgcttgtacagacggccgcagtactcgcagcgattcacgggatgcacctcatgaatgagttgtacctgacttcctttgacgagaaatttcagtggaaaattgaggcctggcgtttgtacctggcgctctactatgttgtctgcatcggcatgaccatcttctgtctcgatggtggtcatgctgacgagccctcgcgggaggcaagtccagacctcggcgcggcaggggcggagctcgaggacgagagcgcgcaggccggagctgtccagggtcctgagacgctgcggagtcaggttagtaggcagtgtcaggagattgacttgcatgatcttttcgagggcgtgagggaggttcagatggtacttgatctccacgggtccgttggtggagatgtcaatggcttgcagggttccgtgccccttgggcgctaccaccgtgcccttgtttttccttttgggcggcggtggctctgttgcttcttgcatgtttaggagcggtgtcgagggcgcgcaccgggcggcaggggcggctcgggacccggcggcatggctggcagtggtacgtcggcgccgcgcgcgggtaggttctggtactgcgccctgagaagactcgcatgtgcgacgacgcggcggttgacatcctggatctgacgcctctgggtgaaagctaccggccccgtgagcttgaacctgaaagagagttcaacagaatcaatctcggtatcgttgacggcggcttgcctaaggatttcttgcacgtcgccagagttatcctggtaggcgatctcggccatgaactgctggatctcttcctcttgaagatctccgcggcccgctctctcgacggtggccgctaggtcgttggagatgcgcccaatgagttgagagaatgcattcatgcccgcctcgttccagacgcggctgtagaccacagcccccacgggatctctcgcgcgcataaccacctgggcgaggttaagctctacgtggcgggtgaagaccgcatagttgcataggcgctggaaaaggtagttgagtgtggtggcgatgtgctcggtgacgaagaaatacatgatccatcgtctcagcggcatctcgctgacatcgcccagcgcttccaagcgctccatggcctcgtagaagtccacggcaaagttgaaaaactgggagttacgcgcggacacggtcaactcctcttccagaagacggatgagttcggcaatggtggtgcgcacctcgcgctcgaaatcccccgggatttcttcctcaatctcttcttcttccactaacatctcttcctcttcaggtggggctgcaggaggagggggaacgcggcgacgccggcggcgcacgggcagacggtcgatgaatctttcaatgacctctccgcggcggcggcgcatggtctcggtgacggcacgaccgttctccctgggtctcagagtgaagacgcctccgcgcatctccctgaagtggtgactgggaggctctccgttgggcagggacaccgcgctgattatgcattttatcaattgccccgtaggtactccgcgcaaggacctgatcgtctcaagatccacgggatctgaaaacctttcgacgaaagcgtctaaccagtcgcaatcgcaaggtaggctgagcactgtttcttgcgggcgggggcggctagacgctcggtcggggttctctctttcttttccttcctcctcttgggaggatgagacgatgctgctggtgatgaaattaaaataggcagttttgagacggcggatggtggcgaggagcaccaggtctttgggtccggcttgttggatgcgcaggcgatgggccattccccaagcattatcctgacatctggccagatctttatagtagtcttgcatgagtcgttccacgggcacttcttcttcgcccgctctgccatgcatgcgagtgatcccgaacccgcgcatgggctggacaagtgccaggtccgctacaaccctttcggcgaggatggcttgctgcacctgggtgagggtggcttggaagtcgtcaaagtccacaaagcggtggtaggccccggtgttgattgtgtaggagcagttggccatgactgaccagttgactgtctggtgcccagggcgcacgagctcggtgtacttgaggcgcgagtatgcgcgggtgtcaaagatgtaatcgttgcaggtgcgcaccaggtactggtagccgatgagaaagtgtggcggtggctggcggtacaggggccatcgctctgtagccggggctccgggggcaaggtcttccagcatgaggcggtggtaaccgtagatgtacctggacatccaggtgataccggaggcggtggtggatgcccgcgggaactcgcgtacgcggttccagatgttgcgcagcggcatgaagtagttcatggtaggcacggtttggcccgtgagacgtgcacagtcgttgatgctctagacatacgggcaaaaacgaaagcggtcagcggctcgtctccgtggcctggaggctaagcgaacgggttgggctgcgcgtgtaccccggttcgaatctcggatcaggctggagccgcagctaacgtggtactggcactcccgtctcgacccaggcctgcacaaaacctccaggatacggaggcgggtcgtttttttgctttttcctggatgggagccagtgctgcgtcaagctttagaacactcagttctcggggctgggagtggctcgcgcccgtagtctggagaattaatcgccagggttgcgttgcggtgtgccccggttcgagtcttagcgcgccggatcggccggtttccgcgacgtttctaagaccccgccagccgacttctccagtttacgggagcgagccctcttttttttttttgttttttgttgcccagatgcatcccgtgctgcgacagatgcgcccccagcaacagcccccttctcagcagcagctacaacaacagccacaaaaggctcttcctgctcctgtaactactgcggctgcagccgtcagcggcgcgggacagcccgcctatgatctggaattggaagagggcgagggactggcgcgcctgggcgcaccatcgcccgagcggcacccgcccagccgacttctccagtttacgggagcgagccctcttttttttttttgttttttgttgcccagatgcatcccgtgctgcgacagatgcgcccccagcaacagcccccttctcagcagcagctacaacaacagccacaaaaggctcttcctgctcctgtaactactgcggctgcagccgtcagcggcgcgggacagcccgcctatgatctggaattggaagagggcgagggactggcgcgcctgggcgcaccatcgcccgagcggcacccgcgggtgcaactgaaaaaggactctcgcgaggcgtacgtgccccagcagaacctgttcagggacaggagcggtgaggagccagaggagatgcgagcatctcgatttaacgcgggtcgcgagctgcgccacggtctggatcgaagacgggtgctgcaagacgaggattttgaggtcgatgaagtgacagggatcagcccagctagggcacatgtggccgcggccaacctagtctcagcctacgagcagaccgtgaaggaggagcgcaacttccaaaaatcttttaacaaccatgtgcgcaccctgatcgcccgcgaggaagtgaccctgggtctgatgcatctgtgggacctgatggaggctatcacccagaaccccactagcaaaccactgacagctcagctgtttctggtggttcaacatagcagggacaacgaggcattcagggaggcgttgttgaacatcaccgagcctgatgggagatggctgtatgatctgatcaacatcctgcaaagtattatagtgcaggaacgtagcctgggtttggctgagaaagtggcagctatcaactactcggtcttgagcctgggcaaatactacgctcgcaagatctacaagaccccctacgtacccatagataaggaggtaaagatagatgggttttacatgcgcatgactctgaaggtgctgactctgagcgacgatctgggggtgtatcgcaatgacaggatgcaccgcgcggtgagcgccagcaggaggcgcgagctgagcgacagagaacttatgcacagcttgcaaagagctctaacgggggccgggactgatggggagaactactttgacatgggagcggacttgcaatggcaacccagtcgcagggccatggaggctgcagggtgtgagcttccttacatagaagaggtggatgaagtcgaggacgaggagggcgagtacttggaagactgatggcgcgacccgtatttttgctagatggaacagcagcaggcaccggaccccgcaatgcgggcggcgctgcagagccagccgtccggcattaactcttcggacgattggacccaggccatgcaacgcataatggcgctgacgacccgcaaccccgaagcctttagacagcaaccccaggccaaccgcctttcggccatactggaggccgtagtgccctcccgctccaaccccacccacgagaaggtcctggctatcgtgaacgcgctggtggagaacaaggccatccgtcccgatgaggccgggctggtatacaatgctctcttggagcgcgtggcccgttacaacagcagcaacgtgcaaaccaacctggacaggatggtgaccgatgtgcgcgaggccgtgtctcagcgcgagcggttccagcgcggcgccaacttggggtcgttggtagcgctaaacgctttcctcagcacccagcccgccaacgtgccccgtggtcagcaagactatacaaactttttgagtgcattgagactcatggtagctgaggtgccccagagcgaggtgtaccagtccgggccagattacttcttccagaccagcagacagggcttgcagacagtgaacctgactcaggctttcaagaacctgaagggtctgtggggagtgcacgccccagtaggagatcgcgcgaccgtgtctagcttgctgactcccaactcccgcctgctgctgctgctggtatccccctttactgacagcggtagcatcgaccgcaactcgtacttgggctacctgcttaacctgtatcgcgaggccatagggcagagccaggtggacgagcagacctatcaagaaatcacccaagtgagccgcgccctgggtcaggaagacacgggcagtttggaagccaccctgaacttcttgctaaccaaccggtcgcagaagatccctcctcagtatgcgcttaccgctgaggaggagcggatcctcagatacgtgcaacagagcgttggactgtttctgatgcaggagggggcgacacctaccgccgcgctggacatgacagctcgaaacatggagcccagcatgtatgctagtaacaggcctttcattaacaaactgctggactacctgcacagggcggccgccatgaactctgattatttcaccaatgctatcctgaacccacactggctgcccccacctggtttctacactggcgagtacgacatgcccgaccccaatgacgggttcctgtgggacgatgtggacagcagcatattctccccgcctcccggttatacagtttggaagaaggaagggggcgatagaagacactcttccgtgtcgctgtccggaacggctggtgctgccgcgaccgtgcccgaagctgcaagtcctttccctagcttgcccttttcactaaacagcgttcgcagcagtgaactggggagaataacccgcccgcgcttgatgggcgaggatgagtacttgaatgactctttgctgaggccagagagggaaaagaacttccccaacaatggaatagagagtctggtggataagatgagtagatggaagacctatgcgcaggatcacagagacgagcccaggatattgggggctacaagcagaccgacccgtagacgccagcgccacgacagacagatgggtcttgtgtgggacgatgaggactctgccgatgatagcagcgtgttggacttgggtggaagaggagggggcaacccgttcgctcatctgcgtcccagattcgggcgcatgttgtaaaagtgaaagtaaaataaaaatgcaactcaccaaggccatggcgaccgagcgtgcgttcgttcttttttgttatctgtgtctagtacgatgaggagacgagccgtgctaggcggagcggtggtgtatccggagggtcctcctccttcttacgagagcgtgatgcagcaacaggcggcgatgatacagcccccactggaggttcccttcgtacccccgcggtacctggcgcctacggaagggagaaacagcattcgttactcggagctgtcgcccctgtacgataccaccaagttgtatctggttgacaacaagtcggcggacatcgcctccctgaactatcagaacgaccacagcaacttcctgaccacggtggtgcagaacaatgactttacccccacggaggctagcacccagaccatcaactttgacgaacggtcgcgatggggcggtcatctgaagaccatcatgcacaccaacatgcccaacgtgaacgagtacatgttcagcaacaagttcaaggcgagggtgatggtgtccagaaaagctcctgaaggtgttacagtaaatgacacctatgatcataaagaggatatcttgaagtatgagtggtttgagttcattttaccagaaggcaacttttcagccaccatgacgatcgacctgatgaacaatgccatcattgacaactacctggaaattggcagacagaatggagtgctggaaagtgacattggtgttaagtttgacactagaaatttcaggctcgggtgggaccccgaaactaagttgattatgccaggagtctacacttatgaggcattccatcctgacattgtattgctgcctggttgcggggtagactttactgaaagccgacttagcaacttgcttggcatcaggaagagacatccattccaggagggtttcaaaatcatgtatgaagatcttgaagggggtaatattcctgcccttttggatgtcactgcctatgaggaaagcaaaaaggataccactactgaaacaaccacactggctgttgcagaggaaactagtgaagatgataatataactagaggagatacctatataacagaaaaacacaaacgtgaagctgcagctgctgaagttaaaaaagagttaaagatccaacctctagaaaaagacagcaagagtagaagctacaatgtcttggaagacaaaatcaacacggcctaccgcagttggtacctgtcctacaattacggtaaccctaagaaaggaataaggtcttggacactgctcaccacttcagatgtcacctgtggggcagagcaggtttactggtcgctccctgacatgatgcaagacccagtcacgttccgctccacaagacaagtcaacaactacccagtggtgggtgcagagcttatgcccgtcttctcaaagagtttctacaatgagcaagccgtgtactctcagcagctccgacaggccacttcgctcacgcacgtcttcaaccgcttccctgagaaccagatcctcatccgcccgccggcgcccacaattaccaccgtcagtgaaaacgttcctgctctcacagatcacgggaccctgccgttacgcagcagtatccggggagtccagcgcgtgaccgttactgacgccagacgccgcacctgtccctacgtttacaaggccctgggcatagtcgcgccgcgcgttctttcaagccgcactttctaaaaaaaaaaaatgtccattctcatctcgcccagtaataataccggttggggactgtatgcgcccaccaagatgtatggaggcgcccgcaaacgctctacccagcaccctgtgcgcgttcgcggtcatttccgcgctccctggggcgcactcaagggtcgtacccgcactcggaccacggtcgatgatgtgatcgaccaggtggtcgccgatgctcgtaattatactcctactgcgcctacatctactgtggatgcagttattgacagtgtggtggcagacgcccgcgcctatgctcgccggaagagccgaaggaggcgcatcgccaggcgccacagggctactcccgccatgcgagctgcaaaagctattctgcggagggccaaacgtgtggggcgaagagccatgcttagagcggccagacgcgcggcttcaggtgccagcagcggcaggtcccgcaggcgcgcggccacggcggcagcagcggccattgccaacatggcccaaccgcgaagaggcaatgtgtactgggtgcgtgatgccactaccggccagcgcgtgcccgtgcgcactcgcccccctcgcacttagaagatactgagcagtctccgatgttgtgtcccagcggcaagtatgtccaagcgcaaatacaaggaagagatgctccaggtcatcgcgcctgaaatctacggtccaccggtgaaggatgaaaaaaagccccgcaaaatcaagcgggtcaaaaataacaaaaaggaagaagatgacgatgatgggctggtggagtttgtgcgcgagttcgccccaagacggcgcgtgcagtggcgcgggcgcaaagtgcgtcaagtgctcagacccgggaccactgtggtttttacacccggcgagcgttccagcactacttttaaacggtcctatgatgaggtgtacggggatgacaatattcttgagcaggcggcagaccgccttgacgagtttgcttatggcaagcgcactagatccagtcccaaagaggaggcggtgtccattcctttggatcatggaaatcccacccccagcctcaaaccagtcaccctgcagcaagtgctgcccgtgcctgcgcggagaggcgtaaagcgcgagggtgaggacctgtatcccaccatgcagctaatggtgcccaagcgccagaggctagaagacgtactggagaaaatgaaagtggatgccgatatccagcctgaggtcaaagtaagacctatcaaggaagtggcgccaggtttgggagtacaaaccttcgacatcaagattcccaccgagtccatggaagtgcagaccgaacctgcaaaacccacaaccacctcaattgaggtgcaaacggaaccctggatgcccgcgcccgttgccgcccccagcaccactcgaagatcacgacgaaagtacggcccagcaagtctgctaatgcccaactatgctctgcacccatccatcattcccactccgggttacagaggcactcgctactatcgaaaccggagcaacacctctcgccgccgcaaaccacctgcaagtcgcactcgccgtcgccgccgccgcaacactgccagcaaattgactcccgccgccctggtgcggagagtgtaccgcgatggtcgcgctgaacctctgacgctgccgcgcgcgcgctaccatccaagcatcaccacttaatgactgttgacgctgcctccttgcagatatggccctcacttgccgccttcgcgtccccattactggctaccgaggaagaaactcgcgccgtagaaggatgttggggcgagggatgcgccgccacagacgaaggcgcgctatcagcagacgattagggggtggctttttgccagctcttatacccatcatcgccgcagcgatcggggcgataccaggcatagcttccgtggcggttcaggcctcgcagcgccactaacattggaaaaacttataaataaaaaatagaatggactctgacgctcctggtcctgtgactatgtttttgtagagatggaagacatcaatttttcatccctggctccgcgacacggcacgaggccgtacatgggcacctggagcgacatcggcacgagccaactgaacgggggcgccttcaattggagcagtatctggagcgggcttaaaaattttggctcgaccgtaaaaacctatgggaacaaagcttggaacagcagcacagggcaggctctgagaaataagcttaaggaacaaaacttccaacagaaggtggtcgatgggatcgcctctggtattaacggcgtagtggatctggccaaccaggctgtacaaaaacagataaacagccgcctggacccgccgcccgcaacccctggtgaaatggaagtggaggaagaacttcctccgctggaaaagcggggcgacaagcgtccgcgacccgagctagagcacacgctggtgacgcgcgcagacgagcccccttcatacgaggaggcagtaaagctcggaatgcccactaccaggcccgtagctcacatggctaccggggtgatgaaaccttctgagttacatcgacccgccaccttggacttgcctcctccccctgcttctgcggcgcctgttcccaaacctgtcgctaccagaaagcccaccgccgtacagcccgttgccgtagccagaccgcgtcctgggggcacaccgcgcccgaaagcaaactggcaaagtactctgaacagcatcgtgggtctgggcgtgcagagtgtaaagcgccgtcgctgctattaattaaatatggagtagcgcttaacttgcttgtctgtgtgtatgtatcatcaccacgccgccgcagcagaggagaaaggaagaggtcgcgcgccgaggctgagttgctttcaagatggccaccccatcgatgatgccccaatgggcatacatgcacatcgccggacaggatgcttcggagtacctgagtccgggtctggtgcagttcgcccgtgcaacagacacctacttcagtatggggaacaagtttagaaaccccacagtggcgcccacccacgatgtgaccaccgaccgtagccagcgactgatgctgcgcttcgtgcccgttgaccgggaggacaatacatactcttacaaagtgcggtacaccctcgccgtgggcgacaacagagtgcttgacatggccagcacattctttgacattaggggggtgcttgatagaggtcctagcttcaagccatattccggcacagcttacaattcactggctcctaagggcgcgcctaacacatctcagtggatagttacaacgggagaagacaatgccaccacatacacatttggcattgcttccacgaagggagacaatattactaaggaaggtttagaaattgggaaagacattactgcagacaacaagcccatttatgccgataaaacatatcagccagagcctcaagttggagaagaatcatggactgatattgatggaacaaatgaaaaatttggaggtagagctcttaaaccagctactaaaatgaagccatgctacgggtcttttgcaagacctacaaacataaaagggggccaagctaaaaacagaaaagtaacaccaaccgaaggagatgttgaagctgaggagccagatattgatatggaatttttcgatggtagagaagctgctgacgctttttcgcctgaaattgtgctttacacggaaaatgtcaatttggaaactccagacagccatgtggtatacaagccaggaacttctgatggtaactctcatgcaaatttgggtcaacaagccatgcctaacagacccaattacattggcttcagggataactttgtaggtcttatgtactacaacagtactggaaatatgggagttttggccggccaagcatcacaactgaatgcagtggttgacttgcaggacagaaacactgaactgtcatatcagcttttgcttgattctctgggagacagaagcagatacttcagcatgtggaatcaggctgtggacagctatgatcccgatgttcgtattattgaaaatcatggcgtcgaggatgaactgcctaattactgttttcctctggatggcataggaccagggaacaaatatcaaggcattaaacctagagacactgcatgggaaaaagatactaaagtttctacagctaatgaaatagccataggcaacaatctggctatggaaattaatatccaagctaatctttggagaagttttctgtactccaatgtggctttgtaccttccagatgtttacaagtacacgccaactaacattactctgcccgctaacaccaacacctatgagtacatgaacgggcgagtggtttccccatctctggtcgattcatacatcaacattggcgccaggtggtctcttgacccaatggacaatgtgaatccatttaaccaccaccgcaatgctggcctacgctaccggtccatgcttctgggcaatggccgttatgtgcctttccacatacaagtgcctcaaaaattctttgctgtcaagaacctacttcttctacctggctcctacacctatgagtggaacttcagaaaggatgtgaacatggtcctgcaaagttcccttggaaatgacctcagaacagatggtgctaacataagtttcaccagcatcaacctctatgccaccttcttccccatggctcacaacaccgcttcaactcttgaagccatgctgcgcaacgataccaatgatcagtcattcaacgactacctctctgcagctaacatgctttaccccatccctgccaatgcaaccaacattccaatttccatcccatctcgcaactgggcagccttcaggggctggtccttcaccagactcaaaaccaaggagactccatctcttggatcagggttcgatccctacttcgtttattctggatctattccctacctggatggcactttttaccttaaccacactttcaagaaggtctccatcatgtttgactcctcagtcagctggcctggcaatgacaggctgttgtctccaaatgagtttgaaatcaagcgcactgtggatggggaaggatacaatgtggcccaatgcaacatgaccaaagactggttcctggttcagatgcttgccaactacaacattggctaccagggcttttacatccctgagggatacaaggatcgcatgtactcctttttcagaaacttccagcctatgagcaggcaggtggttgatgaggttaattacactgactacaaagccgtcaccttaccatatcaacacaacaactctggctttgtaggataccttgcgcctactatgagacaaggggaaccttacccagccaattatccatacccgctcatcggaactactgccgttaaaagtgttacccaaaaaaagttcctgtgcgacaggaccatgtggcgcataccgttctccagcaacttcatgtccatgggagcccttacggacctgggacagaacctgctctatgccaactcggcccatgcgctggacatgacttttgaggtggatcccatggatgagcccaccctgctttatcttcttttcgaagtcttcgacgtggtcagagtgcaccagccacaccgcggcgtcatcgaggccgtctacctgcgcacaccgttctcggccggcaacgccaccacataagaagcctcttgcttcttgcaagcagcagctgcagccatgtcatgcgggtccggaaacggctccagcgagcaagagctcaaagccatcgtccgagacctgggttgcggaccctatttcctgggaacctttgacaagcgtttcccggggttcatggcccccgacaagctcgcctgcgccatagtcaacactgccggacgcgagacggggggagagcactggctggcttttggttggaacccgcgctccaacacctgctacctttttgatccttttgggttctcggatgagcgactcaaacagatttaccagtttgagtacgaggggctcctgcgccgcagtgcccttgctaccaaagaccgctgcatcaccctggaaaagtccacccagagcgtgcagggcccacgctcagccgcctgtggacttttttgctgtatgttccttcatgcctttgtgcactggcccgaccgccccatgaacggaaaccccaccatgaagttgctgactggggtgcccaacagcatgctccaatctccccaagtgcagcccaccctgcgccgcaaccaggaggcgctatatcgcttcctaaacacccactcatcttactttcgttctcaccgcgcacgcatcgaaagggccaccgcgtttgaccgtatggatatgcaataagtcatgtaaaaccgtgttcaataaaaagcactttatttttacatgcactaaggctctcgttttttactcattcgttttcattattcactcagaaatcaaatgggttctggcgggagtcaaagtgacccgcgggcagggatacgttgcggaactgtaacctgttctgccacttgaactcggggatcaccaacttgggaactggaatctcgggaaaggtgtcttgccacaactttctggtcagctgcagggcgccaagtaggtcaggagcagagatcttgaaatcacagttgggaccggcattctggacacgggagttgcggtacactgggttgcaacactggaacaccatcaaggctgggtgtctcacgcttgccagcacggtcgggtcactgatggtagtcacatccaagtcttcagcattggccatcccaaagggggtcatcttacaggtctgcctgcccatcacgggagcgcagcctggcttgtggttgcaatcgcaatgaatggggatcagcatcatcctggcttggtcgggggttatccctgggtacacggccttcatgaaggcttcgtactgcttgaaagcttcctgagccttacttccctcggtatagaacatcccacaggacttgctggaaaattgattagtagcacagttggcatcatttacacagcagcgggcatcgttgttggccaactggaccacatttctgccccagcggttctgggtgatcttggctctgtctgggttctccttcatagcgcgctgtccgttctcgctcgccacatccatctcgataatgtggtccttctgaatcatgatagtgccatgcaggcatttcaccttgccttcataatcggtgcatccatgagcccacagagcgcacccggtgcactcccaactattgtgggcgatctcagaataagaatgtaccaatccctgcatgaatcttcccatcatcgctgtcagggtcttcatgctactaaatgtcagcgggatgccacggtgctcctcgttcacatactggtggcagatacgcttgtactgctcgtgctgctctggcatcagcttgaaagaggttctcaggtcattatccagcctgtacctctccattagcacagccatcacttccatgcccttctcccaggcagataccaggggcaagctcaaaggattcctaacagcaatagaagtagctcctttagctatagggtcattcttgtcgatcttctcaacacttctcttgccatccttctcaatgatgcgcaccggggggtagctgaagcccacggccaccaactgagcctgttctctttcttcttcgctgtcgtggccgatgtcttgcagagggacatgcttggtctttctgggcttcttcttgggagggatcgggggaggactgttgctccgttccggagacagggatgaccgcgaagtttcgcttaccagtaccacctggctctcgatagaagaatcggaccccacgcgacggtaggtgttcctcttcgggggcagaggtggaggcgactgagatgggctgcggtctggccttggaagcggatggctggcagagcccattccgcgttcgggggtgtgctcccgttggcggtcgcttgactgatttcctccgcggctggccattgtgttctcctaggcagagaaacaacagacatggaaactcagccatcactgccaacatcgctgcaagcgccatcacacctcgcccccagcagcgacgaggaggagagcttaaccaccccaccacccagtccagctaccaccacctctaccctcgatgatgaggaggaggaggtcgacgcagcccaggagatgcaggcgcaggataatgtgaaagcggaagagattgaggcagatgtcgagcaggacccgggctatgtgacaccggcggagcacgaggaggagctgaaacgttttatagacagagaggatgacgaccgcccagagcatcaagcagatggcgatcaccaggaggctggcatcggggatcaagttgccgactacctcaccgggcttgggggggaagacgtgctcctcaaacatctagcaaggcagtcgaacatagttaaagacgcactactcgacctcaccgaagtgcccatcagtgtggaagagcttagccgcgcctacgagctgaacctcttttcgcctcacataccccccaagcggcagccaaacggcacctgcgaggccaaccctcgactgaacttctatccagcttttactgtccccgaagtgctggccacctaccacatcttttttaagaaccaaaagattccagtctcctgccgcgccaaccgcacccgcgccgatgcccttctcaacttgggtccgggagctcgcttacctgatatagcttccttggaagaggttccaaaaatctttgagggtctgggaagtgatgagactcgggccgcaaatgctctgcaacagggagagaatggcatggatgaacatcacagcgctttagtggaactggagggtgacaatgcccggcttgcagtgctcaagcgcagtatcgtggtcacccattttgcctaccccgctgttaacctgccccccaaagttatgagcgctgttatggaccatctgctcatcaaacgagcaggtccactttcagaaaaccagaacatgcaggatccagacgcctcggacgagggcaagccggtagtcagtgacgagcagctatctcgctggctgggtaccaactccccccgagatttggaagagaggcgcaagcttatgatggctgtagtgctagtaactgtggagctggagtgtttgcgccgctttttcaccgaccccgagaccctgcgcaagctagaggagaacctgcactacacctttagacatggcttcgtgcggcaggcatgcaagatctccaacgtggagcttaccaacctggtttcttacatgggcattttgcatgagaaccggctagggcagagcgtcctgcacaccacccttaaaggggaggcccgccgtgactacatccgagactgtgtctacctctacctctgccatacctggcagactggcatgggtgtgtggcaacagtgtttggaagagcagaacctaaaagagctggacaagctcttgcagagatccctcaaagccctgtggacaggttttgatgagcgcaccgtcgcctcggacctggcagacatcatcttccccgagcgtctcagggttactctgcgaaacggcctgccagactttatgagccagagcatgcttaacaactttcgctctttcatcctggaacgctccggtatcctgcctgccacctgctgtgcgctgccctccgactttgtgcctctcacctaccgcgagtgcccaccgccgctatggagccactgctacctgttccgcctggccaactacctctcctaccactcggatgttatagaggatgtgagcggagacggtctgctggaatgccactgccgctgcaatctttgcacaccccaccgctcccttgcctgcaacccccagttgctgagcgagacccagatcatcggcaccttcgagttgcagggtcccagcagtgaaggcgaggggtcttctccggggcagagtctgaaactgacaccggggctgtggacctccgcctacctgcgcaagtttcatcccgaggattaccacccctatgagatcaggttctatgaggaccagtcacatcctcccaaagtcgagctctcagcctgcgtcatcacccagggagcaattctggcccaattgcaagccatccaaaaatcccgccaagaatttctactgaaaaagggaagcggggtctaccttgacccccagaccggtgaggagctcaacacaaggttcccccaggatgtcccatcgccgaggaagcaagaagctgaaggtgcagctgacgcccccagaggatatggaggaagactgggacagtcaggcagaggaggagatggaagattgggacagccaggcagaggaggtggacagcctggaggaagacagtttggaggaggaagacgaggaggcagaggaggtggaagaagcaaccgccgccaaacagttgtcatcggcggcggagacaagcaagtccccagacagcagcacggctaccatctccgctccgggtcggggggtccagcggcggcccaacagtagatgggacgagaccgggcgattcccaaacccgaccaccgcttccaagaccggtaagaaggagcgacagggatacaagtcctggcgtggacataaaaacgctatcatctcctgcttgcatgaatgcgggggcaacatatccttcacccggcgatacctgctcttccaccacggtgtgaacttcccccgcaatatcttgcattactaccgtcacctccacagcccctactgcagtcagcaagtcccggcaaccccgacagaaaaagacagcagcgacaacggtgaccagaaaaccagcagttagaaaatctacaacaagtgcagcaggaggaggactgaggatcacagcgaacgagccagcgcagaccagagagctgaggaaccggatctttccaaccctctatgccatcttccagcagagtcgggggcaagagcaggaactgaaagtaaaaaaccgatctctgcgctcgctcaccagaagttgtttgtatcacaagagcgaagaccaacttcagcgcactctcgaggacgccgaggctctcttcaacaagtactgcgcgctgactcttaaagagtagcccttgcccgcgcttattcgaaaacggcgggaatcacgtcacccttggcacctgtcctttgccctagtcatgagtaaagagattcccacgccttacatgtggagctatcagccccaaatggggttggcagcaggcgcctcccaggactactccacccgcatgaattggcttagcgccgggccctcaatgatatcacgggttaatgatatacgagcttatcgaaaccagttactcctagaacagtcagctctcaccaccacaccccgccaacaccttaatccccgaaattggcccgccgccctggtgtaccaggaaactcccgctcccaccaccgtactacttcctcgagacgcccaggccgaagttcagatgactaacgcaggtgtacagctggcgggcggttccgccctatgtcgtcaccgacctcaacagagtataaaacgcctggtgatcagaggccgaggtatccagctcaacgacgagtcggttagctcttcgcttggtctgcgaccagacggagtcttccagatcgccggctgtgggagatcttccttcacccctcgtcaggctgtactgactttggagagttcgtcctcgcagccccgctcgggcggcatcggaactctccagttcgtggaggagtttactccctctgtctacttcaaccccttctccggctctcctggccagtacccagacgagttcataccgaacttcgacgcaatcagcgagtcagtggatggctatgattgatgtctaatggtggcgcggctgagctagctcgactgcgacacctagaccactgccgccgctttcgctgcttcgcccgggaactcaccgagttcatctacttcgaactccccgaggagcaccctcagggtccggcccacggagtgcggattaccatcgaagggggaatagactctcgcctgcatcgaatcttctcccagcgacccgtgctgattgagcgcgaccagggaaatacaaccatctccatttactgcatctgtaaccaccccggattgcatgaaagcctttgctgtcttgtttgtgctgagtttaataaaaactgagttaagaccctcctacggactaccgcttcttcaatcaggactttacaacaccaaccagatcttccagaagacccagacccttcctcctctgatccaggactctaactctaccttaccagcaccatccactactaaccttcccgaaactaacaagcttggatctcatctgcaacaccgcctttcacgaagccttctttctgccaatactaccactcccaaaaccggaggtgagctccgcggtctccctactgacgacccctgggtggtagcgggttttgtaacgttaggagtagttgcgggtgggcttgtgctaatcctttgctacctatacataccttgctgtgcatatttagtcatattgcgctgttggtttaaaaaatgggggccatattagtcgtgcttgctttactttcgcttttgggtctgggctctgctaatctcaatcctcttgatcacgatccatgtctagacttcgacccagaaaactgcacacttacttttgcacccgacacaagccgtctctgtggagttcttattaagtgcggatgggactgcaggtccgttgaaattacacataataataaaacatggaacaataccttatccaccacatgggagccaggagttcccgagtggtatactgtctctgtccgaggtcctgacggttccatccgcattagtaacaacacttttattttttctgaaatgtgcgatctggccatgttcatgagcagacagtatgacctatggcctcccagcaaagagaacattgtggcattttccattgcttattgcttggtaacatgcatcatcactgctatcatttgtgtgtgcatacacttgcttatagttattcgccctagacaaagcaataaggaaaaagagaaaatgccttaacctttttactcataccttttctttacagcatggcttttgttacagctctaattattgccaacattgtcactgtcgctcacgggcaaacaattatccatattaccttaggacataatcacacccttgtagggcccccaattacttcagaggttatttggaccaaacttggaagtgttgattattttgatataatttgcaacaaaactaaaccaatatttgtaatctgtaacagacaaaatctcacgttaattaatgttagcaaaatttataacggttactattatggttatgacagatccagtagtcaatataaaaattacttagttcgcataactcagcccaaattaacagtgcccactatgacaataattaaaatggctaataaagcattagaaaattttacatcaccaacaacgcccaatgaaaaaaacattccaaattcaatgattgcaattattgcggcggtggcattgggaatggcactaataataatatgcatgttcctatatgcttgttgctataaaaagtttcaacataaacaggatccactactaaattttaacatttaattttttatacagatgttttccactacaatttttatcattactagccttgcagctgtaacttatggccgttcacacctaactctacctgttggctcaacatgtacactacaaggaccccaacaaggctatgtcacttggtggagaatatatgataatggagggttcgctagaccatgtgatcagcctggtacaaaattttcatgcaacggaagagacttgaccataattaacataacatcaaatgagcaaggcttctattatggaaccaactataaagatagtttagattacaacattattgtagtgccagccaccacttctgctccccgcaaaaccactttctctagcagcagtgccaaagcaagcacaattcctaaaacagcttctgctatgttaaagcttcaaaaaatcgctttaaataattccacagccgctcccaatacaattcctaaatcaacaattggcatcattactgccgtggtagtgggattaattattatatttttgtgcataatgtactatgcctgctgctatagaaaacatgaacaaaaaggtgatgcattactaaattttgacatttaattttttatagaattatgatattgtttcaatcaaataccactaacactatcaatgtgcagactactttaaatcatgacatggaaaaccacactacctcctatgcatacacaaacattcagcctaaatacgctatgcaatagaaattctaaaagacgtcccatctattctcctatgattagtcgtccccatatggctttgaatgaaatctaagatcttttttttttttctcttacagtatggtgaacaccaatcatgatccctagaaatttcttcttcaccatactcatctgtgctttcaatgtctgtgctactttcacagcagtagccactgcaagcccagactgtataggaccatttgcttcctatgcactttttgccttcgttacttgcatctgcgtgtgtagcatagtctgcctggttattaattttttccaactggtagactggatctttgtacgaattgcctacctacgtcaccatcccgaataccgcaatcaaaatgttgcggcacttcttaggcttatttaaaaccatgcaggctatgctaccagtcattttaattctgctactaccctgcattgccctagcttccaccgccactcgcgctacacctgaacaacttagaaaatgcaaatttcaacaaccatggtcatttcttgattgctaccatgaaaaatctgatttccccacatactggatagtgattgttggaataattaacatactttcatgtacctttttctcaatcacaatataccccacatttaattttgggtggaattctcccaatgcactgggttacccacaagaaccagatgaacatatcccactacaacacatacaacaaccactagcactggtagagtatgaaaatgagccacaaccttcactacctcctgccattagttacttcaacctaaccggcggagatgactgaaatactcaccacctccaattccgccgaggatctgcttgatatggacggccgcgtctcagaacagcgactcgcccaactacgcatccgccagcagcaggaacgcgtgaccaaagagctcagagatgtcatccaaattcaccaatgcaaaaaaggcatattttgcttggtaaaacaagccaagatatcctacgagatcaccgctactgaccatcgcctctcttacgaacttggcccccaacgacaaaaatttacatgcatggtgggaatcacccctatagttatcactcagcaaagtggagatactaaggggtgcattcactgctcttgcgattccatcgagtgcacctacaccctgctaaagaccctatgcggcctaagagacctgctacccatgaattaaaaattaataaaaaatcacttacttgaaatcagcaataaggtctctgttgaaattttctcccagcagcacctcacttccctcttcccaactctggtattctaaaccccgttcagcggcatactttctccatactttaaaggggatgtcaaattttaactcctgtcctgtacccacaatcttcatgtctttcttcccagatgaccaagagagtccggctcagtgattccttcaaccctgtctacccctatgaagatgaaagcacctcccaacacccctttataaacccagggtttatttccccaaatggctttacacaaagcccagacggagttcttactttaaaatgtttaaccccactaacaaccacaggcgggtctctacagttaaaagtgggagggggtcttacaatagatgacaccgacggttttttgaaagaaaacataagtgccaccacaccactcgttaagactggtcactctataggtttgtcgctaggacccggattaggaacaaatgaaaacaaactttgtgccaaattgggagaaggacttacattcaattccaacaacatttgcattaatgacaatattaacaccctatggacaggagttaaccccaccagagccaactgtcaaataatggcctccagtgaatctaatgattgcaaattaattctaacactagttaaaactggagccctcgtcactgcatttgtttatgttataggagtatctaacgattttaatatgctaactacacataaaaatataaatttcactgcagagctgttttttgattctactggtaatttattaactagcctttcatccctaaaaactccacttaatcataaatcagggcaaaacatggctactggtgcccttactaatgctaaaggtttcatgcccagcacaactgcctatcctttcaatgttaattccagagaaaaagaaaactacatttacggaacttgttactacacagctagtgatcacactgcttttcccattgacatatctgtcatgcttaaccaaagagcattaaataatgagacatcatattgtattcgtgtaacttggtcctggaatacaggagttgccccagaagtgcaaacctctgctactaccctagtcacctctccatttaccttttactacattagagaagacgactgacaaataaagtttaacttgtttatttaaaatcaattcataaaattcgagtagttattttgcctcccccttcccatttaacagaatacaccaatctctccccacgcacagctttaaacatttggataccattacagatagacatagttttagattccacattccaaacagtttcaaagcgagccaatctggggtcagtgatacataaaaatgcatcgggatagtcttttaaagcgctttcacagtccaactgctgcggatgcgactccggagtctggatcacggtcatctggaagaagaacgatgggaatcataatccgaaaacggaatcgggcgattgtgtctcatcaaacccacaagcagccgctgtctgcgtcgctccgtgcgactgctgtttataggatcgggatccacagtgtcctgaagcatgattttaatagcccttaacattaactttctggtgcggtgcgcgcagcaacgcattctgatttcacttagattactacagtaggtacagcacattatcacaatattgtttaataaaccataattaaaagcgctccagccaaaactcatatcagatataatcgcccctgcatgaccatcataccaaattttaatataaattaaatgtcgttccctcaaaaacacactacccacatacataatctcttttggcatgtgcatattaacaatctgtctgtaccatggacaacgttggttaatcatgcaacccaatataaccttccgaaaccacactgccaacaccgctcccccagccatgcattgaagtgaaccctgccgattacaatgacaatgaagaacccaattctctcgaccatgaatcacttgagaataaaaaatatctatagtagcacaacaaagacataaatgcatgcatcttctcataattcttaactcctcgggatttagaaacatatcccaaggaatgggaaactcttgcagaacagtaaagctggcagaacaaggaagaccacgaacacaacttacactatgcatagtcatagtatcacaatctggcaacagcgggtggtcttcagtcatagaagctcgggtttcattttcctcacatcgtggtaactgggctctggtgtaagggtgatgtctggcgcatgatgtcgagcgtgcgcgcaaccttgtcataatggagttgcttcctgacattctcgtattttgtatagcaaaacgcggccctggcacaacacactcttcttcgtcttctatcctgccgcttagtgtgttccgtctgataattcaagtacagccacactcttaagttggtcaaaagaatgctggcttcagttgtaatcaaaactccatcatatttaattgttctaaggaaatcatccacggtagcatatgcaaatcccaaccaagcaatgcaactggattgcgtttcaagcagcagaggagagggaagagacggaagaatcatgttaatttttattccaaacgatctcgcagtacttcaaattgtagatcgcgcagatggcatctatcgcccccactgtgttggtgaaaaagcacagctaaatcaaaagaaatgcgattttcaaggtgctcaacggtggcttccaacaaagcctccacgcgcacatccaaaaacaaaagaataccaaaagaaggagcattttctaactcctcaaacatcatattacattcctgcaccattcccagataattttcagctttccagccttgaattattcgtgtcagttcttgtggtaaatccaaaccacacattacaaacaggtcccggagggcgccctccaccaccattcttaaacacaccctcataatgtcaaaatatcttgctcctgtgtcacctgtagcaaattaagaatggcatcatcaattgacatgcccttggctctaagttcttctctaagttctagttgtaaatactctttcatattatcaccaaactgcttagccagaagccccccgggaacaatagcaggggacgctacagtgcagtacaagcgcagacctccccaattggctccagcaaaaacaagattagaataagcatactgggaaccaccagtaatatcatcaaagttgctggaaatataatcaggcagagtttcttgtaaaaattgaataaaagaaaaattttccaaagaaacattcaaaacctctgggatgcaaatgcaataggttaccgcgctgcgctccaacattattagttttgaattagtctgtaaaataaaagaaacaagcgtcatatcatagtagcctgtcgaacaggtggataaatcagtctttccattacaagacaagccacagggtctccagctcgaccctcgtaaaacctgtcatcgtgattaaacaacagcaccgaaagttcctcgcggtggccagcatgaataattcttgatgaagcatataatccagacatgttagcatcagttaaagaaaaaaaacagccaacatagcctctgggtataattatgcttaatcttaagtatagcaaagccacccctcgcggatacaaagtaaaaggcacaggagaataaaaaatataattatttctctgctgctgttcaggcaacgttgcccccggtccctctaaatacacatacaaagcctcatcagccatggcttaccagacaaagtatagcgggcgcacaaagcacaagctctaaagaagctctaaagacgctctccaacctctccacaatatatacacaagccctaaactgacgtaatgggagtaaagtgtaaaaaatcccgccaagcccaacacacaccccgaaactgcgtcagcagggaaaagtacagtttcacttccgcaaacccaacaagcgtagcttcctctttctcacggtacgtcacatccgattaacttgcaacgtcattttcccacggccgccccgcccattttagccgttaaccccacagccaatcaccacacagcgcgcacttttttaaattacctcatttacatattggcaccattccatctataaggtatattatatagagag

SEQ ID NO: 273 - DNA, 136 bp, Human adenovirus
  misc_feature 1..136: note = Ad7 5  (left) ITR corresponds to positions 1-136 in NCBI accession no. AC_000018
  source 1..136: mol_type = genomic DNA
ctctctatttaatataccttatagatggaatggtgccaatatgtaaatgaggtaatttaaaaaagtgcgcgctgtgtggtgattggctgtggggttaacggctaaaatgggcggggcggccgtgggaaaatgacgt

SEQ ID NO: 274 - DNA, 136 bp, Human adenovirus
  misc_feature 1..136: note = Ad7 3  (right) ITR corresponds to positions 35379-35514 in NCBI accession no. AC_000018
  source 1..136: mol_type = genomic DNA
acgtcattttcccacggccgccccgcccattttagccgttaaccccacagccaatcaccacacagcgcgcacttttttaaattacctcatttacatattggcaccattccatctataaggtatattatatagagag

SEQ ID NO: 275 - DNA, 343 bp, Human adenovirus
  misc_feature 1..343: note = Ad7 Packaging Sequence corresponds to positions 137-479 in NCBI accession no. AC_000018
  source 1..343: mol_type = genomic DNA
gacttatgtgggaggagctatgttgcaagttattgcggtaaatgtgacgtaaaacgaggtgtggtttgaacacggaagtagacagttttcccacgcttactgacaggatatgaggtagttttgggcggatgcaagtaaaaattctccattttcgcgcgaaaactgaatgaggaagtgaatttctgagtcatttcgcggttatgacagggtggagtatttgccgagggccgagtagactttgaccgtttacgtggaggtttcgattaccgtgtttttcacctaaatttccgcgtacggtgtcaaagtcctgtgtttttacgtaggtgtcagctgatcgctaggg

SEQ ID NO: 276 - DNA, 3440 bp, Human adenovirus
  misc_feature 1..3440: note = Ad7 E1 corresponds to positions 480-3919 in NCBI accession no. AC_000018
  source 1..3440: mol_type = genomic DNA
tatttaaacctgacgagttccgtcaagaggccactcttgagtgccagcgagaagagttttctccttcgcgccgcaagtcagttctgcgctttgaaaatgagacacctgcgtttcctgccacaggagattatcttcagtgagaccgggatcgaaatactggagtttgtggtaaataccctaatgggagacgacccggaaccgccagtgcagcctttcgatccacctacgctgcacgatctgtatgatttagaggtagacgggcctcaggatcccaatgaggaagctgtgaatgggttttttactgattctatgctgctagctgccgatgaaggattggacataaaccctcctcctgagacccttgttaccccaggggtggttgtggaaagcggcagaggtgggaaaaaattgcctgatctgggagcagctgaaatggacttgcgttgttatgaagagggttttcctccgagtgatgatgaagatggggaaactgagcagtccatccataccgcagtgaatgagggagtaaaagctgccagcgatgtttttaagttggactgtccggagctgcctggacatggctgtaagtcttgtgaatttcacaggaataacactggaatgaaagaactattgtgctcgctttgctatatgagaatgcactgccactttatttacagtaagtgtatttaagtgaaatttaaaggaatagtgtagctgtttaataactgttgaatggtagatttatgttttttacttgtgattttttgtaggtcctgtgtctgatgatgagtcaccttctcctgattcaactacctcacctcctgaaattcaggcgcccgcacctgcaaacgtatgcaagcccattcctgtaaagcctaagcctgggaaacgccctgctgtggataagcttgaggacttgttggagggtggggatggacctttggaccttagtacccggaaactgccaaggcaataagtgccctgcagctgtgtttatttaatgtgacgtcatgtaataaaattatgtcagctgctgagtgttttattacttcttgggtggggacttggatatataagtaggagcagatctgtgtggttagctcacagcaacctgctgccatccatggaggtttgggctatcttggaagacctcagacagactaggctactgctagaaaacgcctcggacggagtctctggcctttggagattctggttcggtggtgatctagctaggctagtgtttaggataaaacaggactacagcgtagaatttgaaaagttattggacgacagtccaggactttttgaagctcttaacttgggtcatcaggctcattttaaggagaaggttttatcagttttagatttttctactcctggtagaactgctgctgctgtagcttttcttacttttatattggataaatggatccgccaaactcacttcagcaagggatacgttttggatttcatagcagcagctttgtggagaacatggaaggctcgcaggatgaggacaatcttagattactggccagtgcagcctctaggagtagcagggatactgagacacccaccgaccatgccagcggttctgcaggaggagcagcaggaggacaatccgagagccggcctggaccctccggtggaggagtagctgacctgtttcctgaactgcgacgggtgcttactaggtctacgaccagtggacagaacagaggcattaagagggagaggaatcctagtgggaataattcaagaaccgagttggctttaagtttaatgagccgcaggcgtcctgaaactgtttggtggcatgaggttcagagcgaaggcagggatgaagtttcaatattgcaggagaaatattcactagaacaacttaagacctgttggttggaacctgaggatgattgggaggtggccattaggaattatgctaagatatctctgaggcctgataaacaatatagaattactaagaagattaatattagaaatgcatgctacatatcagggaatggggcagaggttataatagatacacaagataaagcagcttttagatgttgtatgatgggtatgtggccaggggttgtcggcatggaagcagtaacacttatgaatattaggtttagaggggatgggtataatggcattgtatttatggctaacactaagctgattctacatggttgtagcttttttgggtttaataatacgtgtgtagaagcttgggggcaagttagtgtgaggggttgtagtttttatgcatgctggattgcaacatcaggtagggtcaagagtcagttgtctgtgaagaaatgcatgtttgagagatgtaatcttggcatactgaatgaaggtgaagcaaggatccgccactgcgcagctacagaaactggctgcttcattctaataaagggaaatgccagtgtgaagcataatatgatctgtggacattcggatgagaggccttatcagatgctgacctgcgctggtggacattgcaatattcttgctactgtgcatatcgtttcacatgcacgcaagaaatggcctgtatttgaacataatgtgattaccaagtgcaccatgcacataggtggtcgcaggggaatgtttatgccttaccagtgtaacatgaatcatgtgaaggtaatgttggaaccagatgccttttccagagtgagcttaacaggaatctttgatatgaatattcaactatggaagatcctgagatatgatgacactaaaccgagggtgcgcgcatgcgaatgcggaggcaagcatgctagattccagccggtgtgcgtggatgtgactgaagacctgagacccgatcatttggtgcttgcctgcactggagcggagttcggttccagtggtgaagaaactgactaaagtgagtagtgggggcaagatgtggatggggactttcaggttggtaaggtggacagattgggtaaattttgttaatttctgtcttgcagctgccatgagtggaagcgcttcttttgaggggggagtatttagcccttatctgacgggcaggctcccaccatgggcaggagttcgtcagaatgtcatgggatccactgtggatgggagacccgtccagcccgccaattcctcaacgctgacctatgccactttgagttcgtcaccattggatgcagctgcagccgccgccgctactgctgccgccaacactatccttggaatgggctattacggaagcatcgttgccaattccagttcctctaataacccttcaaccctggctgaggacaagctacttgttctgttggctcagctcgaggccttaacccaacgcttaggcgaactgtctaagcaggtggcccagttgcgtgagcaaactgagtctgctgttgctacagcaaagtctaaataaagatctcaaatcaataaataaa

SEQ ID NO: 277 - DNA, 22921 bp, Human adenovirus
  misc_feature 1..22921: note = Ad7 E2 corresponds to positions 26867-3947 in NCBI accession no. AC_000018
  source 1..22921: mol_type = genomic DNA
tttaagagtcagcgcgcagtacttgttgaagagagcctcggcgtcctcgagagtgcgctgaagttggtcttcgctcttgtgatacaaacaacttctggtgagcgagcgcagagatcggttttttactttcagttcctgctcttgcccccgactctgctggaagatggcatagagggttggaaagatccggttcctcagctctctggtctgcgctggctcgttcgctgtgatcctcagtcctcctcctgctgcacttgttgtagattttctaactgctggttttctggtcaccgttgtcgctgctgtctttttctgtcggggttgccgggacttgctgactgcagtaggggctgtggaggtgacggtagtaatgcaagatattgcgggggaagttcacaccgtggtggaagagcaggtatcgccgggtgaaggatatgttgcccccgcattcatgcaagcaggagatgatagcgtttttatgtccacgccaggacttgtatccctgtcgctccttcttaccggtcttggaagcggtggtcgggtttgggaatcgcccggtctcgtcccatctactgttgggccgccgctggaccccccgacccggagcggagatggtagccgtgctgctgtctggggacttgcttgtctccgccgccgatgacaactgtttggcggcggttgcttcttccacctcctctgcctcctcgtcttcctcctccaaactgtcttcctccaggctgtccacctcctctgcctggctgtcccaatcttccatctcctcctctgcctgactgtcccagtcttcctccatatcctctgggggcgtcagctgcaccttcagcttcttgcttcctcggcgatgggacatcctgggggaaccttgtgttgagctcctcaccggtctgggggtcaaggtagaccccgcttccctttttcagtagaaattcttggcgggatttttggatggcttgcaattgggccagaattgctccctgggtgatgacgcaggctgagagctcgactttgggaggatgtgactggtcctcatagaacctgatctcataggggtggtaatcctcgggatgaaacttgcgcaggtaggcggaggtccacagccccggtgtcagtttcagactctgccccggagaagacccctcgccttcactgctgggaccctgcaactcgaaggtgccgatgatctgggtctcgctcagcaactgggggttgcaggcaagggagcggtggggtgtgcaaagattgcagcggcagtggcattccagcagaccgtctccgctcacatcctctataacatccgagtggtaggagaggtagttggccaggcggaacaggtagcagtggctccatagcggcggtgggcactcgcggtaggtgagaggcacaaagtcggagggcagcgcacagcaggtggcaggcaggataccggagcgttccaggatgaaagagcgaaagttgttaagcatgctctggctcataaagtctggcaggccgtttcgcagagtaaccctgagacgctcggggaagatgatgtctgccaggtccgaggcgacggtgcgctcatcaaaacctgtccacagggctttgagggatctctgcaagagcttgtccagctcttttaggttctgctcttccaaacactgttgccacacacccatgccagtctgccaggtatggcagaggtagaggtagacacagtctcggatgtagtcacggcgggcctcccctttaagggtggtgtgcaggacgctctgccctagccggttctcatgcaaaatgcccatgtaagaaaccaggttggtaagctccacgttggagatcttgcatgcctgccgcacgaagccatgtctaaaggtgtagtgcaggttctcctctagcttgcgcagggtctcggggtcggtgaaaaagcggcgcaaacactccagctccacagttactagcactacagccatcataagcttgcgcctctcttccaaatctcggggggagttggtacccagccagcgagatagctgctcgtcactgactaccggcttgccctcgtccgaggcgtctggatcctgcatgttctggttttctgaaagtggacctgctcgtttgatgagcagatggtccataacagcgctcataactttggggggcaggttaacagcggggtaggcaaaatgggtgaccacgatactgcgcttgagcactgcaagccgggcattgtcaccctccagttccactaaagcgctgtgatgttcatccatgccattctctccctgttgcagagcatttgcggcccgagtctcatcacttcccagaccctcaaagatttttggaacctcttccaaggaagctatatcaggtaagcgagctcccggacccaagttgagaagggcatcggcgcgggtgcggttggcgcggcaggagactggaatcttttggttcttaaaaaagatgtggtaggtggccagcacttcggggacagtaaaagctggatagaagttcagtcgagggttggcctcgcaggtgccgtttggctgccgcttggggggtatgtgaggcgaaaagaggttcagctcgtaggcgcggctaagctcttccacactgatgggcacttcggtgaggtcgagtagtgcgtctttaactatgttcgactgccttgctagatgtttgaggagcacgtcttcccccccaagcccggtgaggtagtcggcaacttgatccccgatgccagcctcctggtgatcgccatctgcttgatgctctgggcggtcgtcatcctctctgtctataaaacgtttcagctcctcctcgtgctccgccggtgtcacatagcccgggtcctgctcgacatctgcctcaatctcttccgctttcacattatcctgcgcctgcatctcctgggctgcgtcgacctcctcctcctcatcatcgagggtagaggtggtggtagctggactgggtggtggggtggttaagctctcctcctcgtcgctgctgggggcgaggtgtgatggcgcttgcagcgatgttggcagtgatggctgagtttccatgtctgttgtttctctgcctaggagaacacaatggccagccgcggaggaaatcagtcaagcgaccgccaacgggagcacacccccgaacgcggaatgggctctgccagccatccgcttccaaggccagaccgcagcccatctcagtcgcctccacctctgcccccgaagaggaacacctaccgtcgcgtggggtccgattcttctatcgagagccaggtggtactggtaagcgaaacttcgcggtcatccctgtctccggaacggagcaacagtcctcccccgatccctcccaagaagaagcccagaaagaccaagcatgtccctctgcaagacatcggccacgacagcgaagaagaaagagaacaggctcagttggtggccgtgggcttcagctaccccccggtgcgcatcattgagaaggatggcaagagaagtgttgagaagatcgacaagaatgaccctatagctaaaggagctacttctattgctgttaggaatcctttgagcttgcccctggtatctgcctgggagaagggcatggaagtgatggctgtgctaatggagaggtacaggctggataatgacctgagaacctctttcaagctgatgccagagcagcacgagcagtacaagcgtatctgccaccagtatgtgaacgaggagcaccgtggcatcccgctgacatttagtagcatgaagaccctgacagcgatgatgggaagattcatgcagggattggtacattcttattctgagatcgcccacaatagttgggagtgcaccgggtgcgctctgtgggctcatggatgcaccgattatgaaggcaaggtgaaatgcctgcatggcactatcatgattcagaaggaccacattatcgagatggatgtggcgagcgagaacggacagcgcgctatgaaggagaacccagacagagccaagatcacccagaaccgctggggcagaaatgtggtccagttggccaacaacgatgcccgctgctgtgtaaatgatgccaactgtgctactaatcaattttccagcaagtcctgtgggatgttctataccgagggaagtaaggctcaggaagctttcaagcagtacgaagccttcatgaaggccgtgtacccagggataacccccgaccaagccaggatgatgctgatccccattcattgcgattgcaaccacaagccaggctgcgctcccgtgatgggcaggcagacctgtaagatgaccccctttgggatggccaatgctgaagacttggatgtgactaccatcagtgacccgaccgtgctggcaagcgtgagacacccagccttgatggtgttccagtgttgcaacccagtgtaccgcaactcccgtgtccagaatgccggtcccaactgtgatttcaagatctctgctcctgacctacttggcgccctgcagctgaccagaaagttgtggcaagacacctttcccgagattccagttcccaagttggtgatccccgagttcaagtggcagaacaggttacagttccgcaacgtatccctgcccgcgggtcactttgactcccgccagaacccatttgatttctgagtgaataatgaaaacgaatgagtaaaaaacgagagccttagtgcatgtaaaaataaagtgctttttattgaacacggttttacatgacttattgcatatccatacggtcaaacgcggtggccctttcgatgcgtgcgcggtgagaacgaaagtaagatgagtgggtgtttaggaagcgatatagcgcctcctggttgcggcgcagggtgggctgcacttggggagattggagcatgctgttgggcaccccagtcagcaacttcatggtggggtttccgttcatggggcggtcgggccagtgcacaaaggcatgaaggaacatacagcaaaaaagtccacaggcggctgagcgtgggccctgcacgctctgggtggacttttccagggtgatgcagcggtctttggtagcaagggcactgcggcgcaggagcccctcgtactcaaactggtaaatctgtttgagtcgctcatccgagaacccaaaaggatcaaaaaggtagcaggtgttggagcgcgggttccaaccaaaagccagccagtgctctccccccgtctcgcgtccggcagtgttgactatggcgcaggcgagcttgtcgggggccatgaaccccgggaaacgcttgtcaaaggttcccaggaaatagggtccgcaacccaggtctcggacgatggctttgagctcttgctcgctggagccgtttccggacccgcatgacatggctgcagctgctgcttgcaagaagcaagaggcttcttatgtggtggcgttgccggccgagaacggtgtgcgcaggtagacggcctcgatgacgccgcggtgtggctggtgcactctgaccacgtcgaagacttcgaaaagaagataaagcagggtgggctcatccatgggatccacctcaaaagtcatgtccagcgcatgggccgagttggcatagagcaggttctgtcccaggtccgtaagggctcccatggacatgaagttgctggagaacggtatgcgccacatggtcctgtcgcacaggaactttttttgggtaacacttttaacggcagtagttccgatgagcgggtatggataattggctgggtaaggttccccttgtctcatagtaggcgcaaggtatcctacaaagccagagttgttgtgttgatatggtaaggtgacggctttgtagtcagtgtaattaacctcatcaaccacctgcctgctcataggctggaagtttctgaaaaaggagtacatgcgatccttgtatccctcagggatgtaaaagccctggtagccaatgttgtagttggcaagcatctgaaccaggaaccagtctttggtcatgttgcattgggccacattgtatccttccccatccacagtgcgcttgatttcaaactcatttggagacaacagcctgtcattgccaggccagctgactgaggagtcaaacatgatggagaccttcttgaaagtgtggttaaggtaaaaagtgccatccaggtagggaatagatccagaataaacgaagtagggatcgaaccctgatccaagagatggagtctccttggttttgagtctggtgaaggaccagcccctgaaggctgcccagttgcgagatgggatggaaattggaatgttggttgcattggcagggatggggtaaagcatgttagctgcagagaggtagtcgttgaatgactgatcattggtatcgttgcgcagcatggcttcaagagttgaagcggtgttgtgagccatggggaagaaggtggcatagaggttgatgctggtgaaacttatgttagcaccatctgttctgaggtcatttccaagggaactttgcaggaccatgttcacatcctttctgaagttccactcataggtgtaggagccaggtagaagaagtaggttcttgacagcaaagaatttttgaggcacttgtatgtggaaaggcacataacggccattgcccagaagcatggaccggtagcgtaggccagcattgcggtggtggttaaatggattcacattgtccattgggtcaagagaccacctggcgccaatgttgatgtatgaatcgaccagagatggggaaaccactcgcccgttcatgtactcataggtgttggtgttagcgggcagagtaatgttagttggcgtgtacttgtaaacatctggaaggtacaaagccacattggagtacagaaaacttctccaaagattagcttggatattaatttccatagccagattgttgcctatggctatttcattagctgtagaaactttagtatctttttcccatgcagtgtctctaggtttaatgccttgatatttgttccctggtcctatgccatccagaggaaaacagtaattaggcagttcatcctcgacgccatgattttcaataatacgaacatcgggatcatagctgtccacagcctgattccacatgctgaagtatctgcttctgtctcccagagaatcaagcaaaagctgatatgacagttcagtgtttctgtcctgcaagtcaaccactgcattcagttgtgatgcttggccggccaaaactcccatatttccagtactgttgtagtacataagacctacaaagttatccctgaagccaatgtaattgggtctgttaggcatggcttgttgacccaaatttgcatgagagttaccatcagaagttcctggcttgtataccacatggctgtctggagtttccaaattgacattttccgtgtaaagcacaatttcaggcgaaaaagcgtcagcagcttctctaccatcgaaaaattccatatcaatatctggctcctcagcttcaacatctccttcggttggtgttacttttctgtttttagcttggcccccttttatgtttgtaggtcttgcaaaagacccgtagcatggcttcattttagtagctggtttaagagctctacctccaaatttttcatttgttccatcaatatcagtccatgattcttctccaacttgaggctctggctgatatgttttatcggcataaatgggcttgttgtctgcagtaatgtctttcccaatttctaaaccttccttagtaatattgtctcccttcgtggaagcaatgccaaatgtgtatgtggtggcattgtcttctcccgttgtaactatccactgagatgtgttaggcgcgcccttaggagccagtgaattgtaagctgtgccggaatatggcttgaagctaggacctctatcaagcacccccctaatgtcaaagaatgtgctggccatgtcaagcactctgttgtcgcccacggcgagggtgtaccgcactttgtaagagtatgtattgtcctcccggtcaacgggcacgaagcgcagcatcagtcgctggctacggtcggtggtcacatcgtgggtgggcgccactgtggggtttctaaacttgttccccatactgaagtaggtgtctgttgcacgggcgaactgcaccagacccggactcaggtactccgaagcatcctgtccggcgatgtgcatgtatgcccattggggcatcatcgatggggtggccatcttgaaagcaactcagcctcggcgcgcgacctcttcctttctcctctgctgcggcggcgtggtgatgatacatacacacagacaagcaagttaagcgctactccatatttaattaatagcagcgacggcgctttacactctgcacgcccagacccacgatgctgttcagagtactttgccagtttgctttcgggcgcggtgtgcccccaggacgcggtctggctacggcaacgggctgtacggcggtgggctttctggtagcgacaggtttgggaacaggcgccgcagaagcagggggaggaggcaagtccaaggtggcgggtcgatgtaactcagaaggtttcatcaccccggtagccatgtgagctacgggcctggtagtgggcattccgagctttactgcctcctcgtatgaagggggctcgtctgcgcgcgtcaccagcgtgtgctctagctcgggtcgcggacgcttgtcgccccgcttttccagcggaggaagttcttcctccacttccatttcaccaggggttgcgggcggcgggtccaggcggctgtttatctgtttttgtacagcctggttggccagatccactacgccgttaataccagaggcgatcccatcgaccaccttctgttggaagttttgttccttaagcttatttctcagagcctgccctgtgctgctgttccaagctttgttcccataggtttttacggtcgagccaaaatttttaagcccgctccagatactgctccaattgaaggcgcccccgttcagttggctcgtgccgatgtcgctccaggtgcccatgtacggcctcgtgccgtgtcgcggagccagggatgaaaaattgatgtcttccatctctacaaaaacatagtcacaggaccaggagcgtcagagtccattctattttttatttataagtttttccaatgttagtggcgctgcgaggcctgaaccgccacggaagctatgcctggtatcgccccgatcgctgcggcgatgatgggtataagagctggcaaaaagccaccccctaatcgtctgctgatagcgcgccttcgtctgtggcggcgcatccctcgccccaacatccttctacggcgcgagtttcttcctcggtagccagtaatggggacgcgaaggcggcaagtgagggccatatctgcaaggaggcagcgtcaacagtcattaagtggtgatgcttggatggtagcgcgcgcgcggcagcgtcagaggttcagcgcgaccatcgcggtacactctccgcaccagggcggcgggagtcaatttgctggcagtgttgcggcggcggcgacggcgagtgcgacttgcaggtggtttgcggcggcgagaggtgttgctccggtttcgatagtagcgagtgcctctgtaacccggagtgggaatgatggatgggtgcagagcatagttgggcattagcagacttgctgggccgtactttcgtcgtgatcttcgagtggtgctgggggcggcaacgggcgcgggcatccagggttccgtttgcacctcaattgaggtggttgtgggttttgcaggttcggtctgcacttccatggactcggtgggaatcttgatgtcgaaggtttgtactcccaaacctggcgccacttccttgataggtcttactttgacctcaggctggatatcggcatccactttcattttctccagtacgtcttctagcctctggcgcttgggcaccattagctgcatggtgggatacaggtcctcaccctcgcgctttacgcctctccgcgcaggcacgggcagcacttgctgcagggtgactggtttgaggctgggggtgggatttccatgatccaaaggaatggacaccgcctcctctttgggactggatctagtgcgcttgccataagcaaactcgtcaaggcggtctgccgcctgctcaagaatattgtcatccccgtacacctcatcataggaccgtttaaaagtagtgctggaacgctcgccgggtgtaaaaaccacagtggtcccgggtctgagcacttgacgcactttgcgcccgcgccactgcacgcgccgtcttggggcgaactcgcgcacaaactccaccagcccatcatcgtcatcttcttcctttttgttatttttgacccgcttgattttgcggggctttttttcatccttcaccggtggaccgtagatttcaggcgcgatgacctggagcatctcttccttgtatttgcgcttggacatacttgccgctgggacacaacatcggagactgctcagtatcttctaagtgcgaggggggcgagtgcgcacgggcacgcgctggccggtagtggcatcacgcacccagtacacattgcctcttcgcggttgggccatgttggcaatggccgctgctgccgccgtggccgcgcgcctgcgggacctgccgctgctggcacctgaagccgcgcgtctggccgctctaagcatggctcttcgccccacacgtttggccctccgcagaatagcttttgcagctcgcatggcgggagtagccctgtggcgcctggcgatgcgcctccttcggctcttccggcgagcataggcgcgggcgtctgccaccacactgtcaataactgcatccacagtagatgtaggcgcagtaggagtataattacgagcatcggcgaccacctggtcgatcacatcatcgaccgtggtccgagtgcgggtacgacccttgagtgcgccccagggagcgcggaaatgaccgcgaacgcgcacagggtgctgggtagagcgtttgcgggcgcctccatacatcttggtgggcgcatacagtccccaaccggtattattactgggcgagatgagaatggacattttttttttttagaaagtgcggcttgaaagaacgcgcggcgcgactatgcccagggccttgtaaacgtagggacaggtgcggcgtctggcgtcagtaacggtcacgcgctggactccccggatactgctgcgtaacggcagggtcccgtgatctgtgagagcaggaacgttttcactgacggtggtaattgtgggcgccggcgggcggatgaggatctggttctcagggaagcggttgaagacgtgcgtgagcgaagtggcctgtcggagctgctgagagtacacggcttgctcattgtagaaactctttgagaagacgggcataagctctgcacccaccactgggtagttgttgacttgtcttgtggagcggaacgtgactgggtcttgcatcatgtcagggagcgaccagtaaacctgctctgccccacaggtgacatctgaagtggtgagcagtgtccaagaccttattcctttcttagggttaccgtaattgtaggacaggtaccaactgcggtaggccgtgttgattttgtcttccaagacattgtagcttctactcttgctgtctttttctagaggttggatctttaactcttttttaacttcagcagctgcagcttcacgtttgtgtttttctgttatataggtatctcctctagttatattatcatcttcactagtttcctctgcaacagccagtgtggttgtttcagtagtggtatcctttttgctttcctcataggcagtgacatccaaaagggcaggaatattacccccttcaagatcttcatacatgattttgaaaccctcctggaatggatgtctcttcctgatgccaagcaagttgctaagtcggctttcagtaaagtctaccccgcaaccaggcagcaatacaatgtcaggatggaatgcctcataagtgtagactcctggcataatcaacttagtttcggggtcccacccgagcctgaaatttctagtgtcaaacttaacaccaatgtcactttccagcactccattctgtctgccaatttccaggtagttgtcaatgatggcattgttcatcaggtcgatcgtcatggtggctgaaaagttgccttctggtaaaatgaactcaaaccactcatacttcaagatatcctctttatgatcataggtgtcatttactgtaacaccttcaggagcttttctggacaccatcaccctcgccttgaacttgttgctgaacatgtactcgttcacgttgggcatgttggtgtgcatgatggtcttcagatgaccgccccatcgcgaccgttcgtcaaagttgatggtctgggtgctagcctccgtgggggtaaagtcattgttctgcaccaccgtggtcaggaagttgctgtggtcgttctgatagttcagggaggcgatgtccgccgacttgttgtcaaccagatacaacttggtggtatcgtacaggggcgacagctccgagtaacgaatgctgtttctcccttccgtaggcgccaggtaccgcgggggtacgaagggaacctccagtgggggctgtatcatcgccgcctgttgctgcatcacgctctcgtaagaaggaggaggaccctccggatacaccaccgctccgcctagcacggctcgtctcctcatcgtactagacacagataacaaaaaagaacgaacgcacgctcggtcgccatggccttggtgagttgcatttttattttactttcacttttacaacatgcgcccgaatctgggacgcagatgagcgaacgggttgccccctcctcttccacccaagtccaacacgctgctatcatcggcagagtcctcatcgtcccacacaagacccatctgtctgtcgtggcgctggcgtctacgggtcggtctgcttgtagcccccaatatcctgggctcgtctctgtgatcctgcgcataggtcttccatctactcatcttatccaccagactctctattccattgttggggaagttcttttccctctctggcctcagcaaagagtcattcaagtactcatcctcgcccatcaagcgcgggcgggttattctccccagttcactgctgcgaacgctgtttagtgaaaagggcaagctagggaaaggacttgcagcttcgggcacggtcgcggcagcaccagccgttccggacagcgacacggaagagtgtcttctatcgcccccttccttcttccaaactgtataaccgggaggcggggagaatatgctgctgtccacatcgtcccacaggaacccgtcattggggtcgggcatgtcgtactcgccagtgtagaaaccaggtgggggcagccagtgtgggttcaggatagcattggtgaaataatcagagttcatggcggccgccctgtgcaggtagtccagcagtttgttaatgaaaggcctgttactagcatacatgctgggctccatgtttcgagctgtcatgtccagcgcggcggtaggtgtcgccccctcctgcatcagaaacagtccaacgctctgttgcacgtatctgaggatccgctcctcctcagcggtaagcgcatactgaggagggatcttctgcgaccggttggttagcaagaagttcagggtggcttccaaactgcccgtgtcttcctgacccagggcgcggctcacttgggtgatttcttgataggtctgctcgtccacctggctctgccctatggcctcgcgatacaggttaagcaggtagcccaagtacgagttgcggtcgatgctaccgctgtcagtaaagggggataccagcagcagcagcaggcgggagttgggagtcagcaagctagacacggtcgcgcgatctcctactggggcgtgcactccccacagacccttcaggttcttgaaagcctgagtcaggttcactgtctgcaagccctgtctgctggtctggaagaagtaatctggcccggactggtacacctcgctctggggcacctcagctaccatgagtctcaatgcactcaaaaagtttgtatagtcttgctgaccacggggcacgttggcgggctgggtgctgaggaaagcgtttagcgctaccaacgaccccaagttggcgccgcgctggaaccgctcgcgctgagacacggcctcgcgcacatcggtcaccatcctgtccaggttggtttgcacgttgctgctgttgtaacgggccacgcgctccaagagagcattgtataccagcccggcctcatcgggacggatggccttgttctccaccagcgcgttcacgatagccaggaccttctcgtgggtggggttggagcgggagggcactacggcctccagtatggccgaaaggcggttggcctggggttgctgtctaaaggcttcggggttgcgggtcgtcagcgccattatgcgttgcatggcctgggtccaatcgtccgaagagttaatgccggacggctggctctgcagcgccgcccgcattgcggggtccggtgcctgctgctgttccatctagcaaaaatacgggtcgcgccatcagtcttccaagtactcgccctcctcgtcctcgacttcatccacctcttctatgtaaggaagctcacaccctgcagcctccatggccctgcgactgggttgccattgcaagtccgctcccatgtcaaagtagttctccccatcagtcccggcccccgttagagctctttgcaagctgtgcataagttctctgtcgctcagctcgcgcctcctgctggcgctcaccgcgcggtgcatcctgtcattgcgatacacccccagatcgtcgctcagagtcagcaccttcagagtcatgcgcatgtaaaacccatctatctttacctccttatctatgggtacgtagggggtcttgtagatcttgcgagcgtagtatttgcccaggctcaagaccgagtagttgatagctgccactttctcagccaaacccaggctacgttcctgcactataatactttgcaggatgttgatcagatcatacagccatctcccatcaggctcggtgatgttcaacaacgcctccctgaatgcctcgttgtccctgctatgttgaaccaccagaaacagctgagctgtcagtggtttgctagtggggttctgggtgatagcctccatcaggtcccacagatgcatcagacccagggtcacttcctcgcgggcgatcagggtgcgcacatggttgttaaaagatttttggaagttgcgctcctccttcacggtctgctcgtaggctgagactaggttggccgcggccacatgtgccctagctgggctgatccctgtcacttcatcgacctcaaaatcctcgtcttgcagcacccgtcttcgatccagaccgtggcgcagctcgcgacccgcgttaaatcgagatgctcgcatctcctctggctcctcaccgctcctgtccctgaacaggttctgctggggcacgtacgcctcgcgagagtcctttttcagttgcacccgcgggtgccgctcgggcgatggtgcgcccaggcgcgccagtccctcgccctcttccaattccagatcataggcgggctgtcccgcgccgctgacggctgcagccgcagtagttacaggagcaggaagagccttttgtggctgttgttgtagctgctgctgagaagggggctgttgctgggggcgcatctgtcgcagcacgggatgcatctgggcaacaaaaaacaaaaaaaaaaaagagggctcgctcccgtaaactggagaagtcggctgggcgggtgccgctcgggcgatggtgcgcccaggcgcgccagtccctcgccctcttccaattccagatcataggcgggctgtcccgcgccgctgacggctgcagccgcagtagttacaggagcaggaagagccttttgtggctgttgttgtagctgctgctgagaagggggctgttgctgggggcgcatctgtcgcagcacgggatgcatctgggcaacaaaaaacaaaaaaaaaaaagagggctcgctcccgtaaactggagaagtcggctggcggggtcttagaaacgtcgcggaaaccggccgatccggcgcgctaagactcgaaccggggcacaccgcaacgcaaccctggcgattaattctccagactacgggcgcgagccactcccagccccgagaactgagtgttctaaagcttgacgcagcactggctcccatccaggaaaaagcaaaaaaacgacccgcctccgtatcctggaggttttgtgcaggcctgggtcgagacgggagtgccagtaccacgttagctgcggctccagcctgatccgagattcgaaccggggtacacgcgcagcccaacccgttcgcttagcctccaggccacggagacgagccgctgaccgctttcgtttttgcccgtatgtctagagcatcaacgactgtgcacgtctcacgggccaaaccgtgcctaccatgaactacttcatgccgctgcgcaacatctggaaccgcgtacgcgagttcccgcgggcatccaccaccgcctccggtatcacctggatgtccaggtacatctacggttaccaccgcctcatgctggaagaccttgcccccggagccccggctacagagcgatggcccctgtaccgccagccaccgccacactttctcatcggctaccagtacctggtgcgcacctgcaacgattacatctttgacacccgcgcatactcgcgcctcaagtacaccgagctcgtgcgccctgggcaccagacagtcaactggtcagtcatggccaactgctcctacacaatcaacaccggggcctaccaccgctttgtggactttgacgacttccaagccaccctcacccaggtgcagcaagccatcctcgccgaaagggttgtagcggacctggcacttgtccagcccatgcgcgggttcgggatcactcgcatgcatggcagagcgggcgaagaagaagtgcccgtggaacgactcatgcaagactactataaagatctggccagatgtcaggataatgcttggggaatggcccatcgcctgcgcatccaacaagccggacccaaagacctggtgctcctcgccaccatccgccgtctcaaaactgcctattttaatttcatcaccagcagcatcgtctcatcctcccaagaggaggaaggaaaagaaagagagaaccccgaccgagcgtctagccgcccccgcccgcaagaaacagtgctcagcctaccttgcgattgcgactggttagacgctttcgtcgaaaggttttcagatcccgtggatcttgagacgatcaggtccttgcgcggagtacctacggggcaattgataaaatgcataatcagcgcggtgtccctgcccaacggagagcctcccagtcaccacttcagggagatgcgcggaggcgtcttcactctgagacccagggagaacggtcgtgccgtcaccgagaccatgcgccgccgccgcggagaggtcattgaaagattcatcgaccgtctgcccgtgcgccgccggcgtcgccgcgttccccctcctcctgcagccccacctgaagaggaagagatgttagtggaagaagaagagattgaggaagaaatcccgggggatttcgagcgcgaggtgcgcaccaccattgccgaactcatccgtcttctggaagaggagttgaccgtgtccgcgcgtaactcccagtttttcaactttgccgtggacttctacgaggccatggagcgcttggaagcgctgggcgatgtcagcgagatgccgctgagacgatggatcatgtatttcttcgtcaccgagcacatcgccaccacactcaactaccttttccagcgcctatgcaactatgcggtcttcacccgccacgtagagcttaacctcgcccaggtggttatgcgcgcgagagatcccgtgggggctgtggtctacagccgcgtctggaacgaggcgggcatgaatgcattctctcaactcattgggcgcatctccaacgacctagcggccaccgtcgagagagcgggccgcggagatcttcaagaggaagagatccagcagttcatggccgagatcgcctaccaggataactctggcgacgtgcaagaaatccttaggcaagccgccgtcaacgataccgagattgattctgttgaactctctttcaggttcaagctcacggggccggtagctttcacccagaggcgtcagatccaggatgtcaaccgccgcgtcgtcgcacatgcgagtcttctcagggcgcagtaccagaacctacccgcgcgcggcgccgacgtaccactgccagccatgccgccgggtcccgagccgcccctgccgcccggtgcgcgccctcgacaccgctcctaaacatgcaagaagcaacagagccaccgccgcccaaaaggaaaaacaagggcacggtggtagcgcccaaggggcacggaaccctgcaagccattgacatctccaccaacggacccgtggagatcaagtaccatctgaacctccctcacgccctcgaaaagatcatgcaagtcaatctcctgacactgcctactaacctgactccgcagcgtctcaggaccctggacagctccggcctgcgcgctctcgtcctcgagctccgcccctgccgcgccgaggtctggacttgcctcccgcgagggctcgtcagcatgaccaccatcgagacagaagatggtcatgccgatgcagacaacatagtagagcgccaggtacaaacgccaggcctcaattttccactgaaatttctcgtcaaaggaagtcaggtacaactcattcatgaggtgcatcccgtgaatcgctgcgagtactgcggccgtctgtacaagcacaagcatgaatgctcggcgcgtcgcagggagttctacttccatcacatcaacagccattcctccaactggtggcaggagatccagttcttcccgattggctctcatcctcgcacagaaaggctcttcctcacctacgatgtggaaacctacacctggatggggtcctttggcaagcagctaatccccttcatgctggtcatgaaactctctggagaccagcggctcgtcaacatcgcctatgacctcgccatgaaacttaagtgggatcgctggcggcaggacccccaaaccttctattgcgtcaccccagaaaaaatggcagtcgggcagcattttcgtcaataccgggaccagttacaaacagcactcgcagtggacctctggtcctccttcctcaaagcgaaccctcacgtgcacgaatgggccctcgaacactatgctctcactgaccctacagatctcacttttgaagaactcaagaagctgcctcatgtcaggggcacccctcgattcttagaactgtacatagtggggcacaacatcaatggctttgatgagatcgtcttggccgctcaggttatcaataaccgagcagaggtccctcagcctttcagaatcacccgaaatttcatgcccagggccggcaagatcctcttcaatgatgttactttcgctttgcccaaccccgcctacaagaagcgggtggacttccaactctgggaacagggggcctgtgatgacatggacttcaagtatcaattcctcaaagtcatggtcagggacacttttgccctcactcatacctcgctgcgcaatgcagcccaagcatactctctcccagtggagaagggatgctgtccctacaaggcagtcaatcagttctacatgttgggctcttaccgtgcagaaaaagacgggtttcccctcgaagagtactggaaggatcgcgaagaataccttctcaaccgcgagctgtgggaaaagaaaagccaaccgcgttatgacatcatccaggaaactctcgactactgtgccctggatgtactcgtcaccgccgagctggtagccaagctgcaagagtcatatgcccacttcataagggactctgtaggcctacctcatgcccattttaacatattccagagacctactatctcttcaaattcccatgccatctttcgccagatcgtttacagggcggaaaaacccaaccgcaccaatctgggcccgggtcttctcgccccctcacatgaactctatgactatgtgcgagcaagcatcagaggggggcgctgttatcccacttacatcggcatcctcgaagagcccctctatgtatacgatatctgtggcatgtatgcctccgcgctcacccaccccatgccctggggcacccctcttaacccctatgagcgcgcgctggcagttcgagaatggcagatgaccttggatgatcccaccaccatcagctattttgacaaagatttgctaccgggaatatttaccatagatgcggacccccctgatgagctcatgctagaccccctcccccctttctgttcaagaaaaggaggtcgactctgctggaccaatgagcccctccgaggcgaggtggccaccagtgtggatctgataaccctgcacaataggggatggcgagtcagaatagttccggatgaactgacaaccatcttccctgaatggaaatgtgtggcgcgcgagtacgtccagcttaacatcgccgccaaggagcgcgcggacaaggaaaagaaccaaaccatgcgctccatcgccaagcttctatccaatgccctctatggatcatttgctaccaagctggacaacaagaagattgtgttttctgaccagatggacgagagtcttatgaaaggcatctctgctggtactgtcaatatcaaatcctcctcgttcctagaaactgacaacctgagtgcagaggtcatgcccgccttcgagagggaatacctaccccaacagctggcgctcctggacagcgatccggaagacagtgaggacgaacagaggcccgcccccttttatacccccccggcggggacccctggtcacgtggcctacacttacaagccaatcacattcttggatgtggaggagggggacatgtgtttacataccgtagagaaggtggaccccctggttgacaacgaccgctacccctcccacgtggcctcctttgtgctggcctggacacgcgcttttgtatcagagtgggctgggttcctctacgaagaggaccgaggcactccgctcgaggacaggcccataaagtcggtctacggggacacggacagcctctttgtcacccagcggggacacgacctcatggaaaccaaaggtaagaaacgcatcaaaaaacatggcggaaaacttgtttttgaccccgatgagccggatctgacctggctcgtggagtgcgaaaccgtctgcgcctcctgcggtgcggatgcatactcccccgaatccattttcctcgcgcccaagctgtatgccctcaaatgtatctactgccccgcctgccataaaacttccaaaggtaagctccgtgccaaaggccacgcggccgaggcgctcaactacgaactcatggtaaactgctacctggccgacatgcagggcgccgatcggcagcggttctcgaccagcaggatgagtctgaagcgcaccctcgcaagcgcccaaccaggcgcgcacccattcaccgtgacggaaacaaccctgactcggacgctgcgaccatggaaggatcggaccctggcagcgctggacgcccatcgtctgattccctactccaggagccgtcccaacccgcgaaacgaggaggtctgctggatcgagatgccatagagcacatcaccgagctctgggaccggctcgagctcttgcaacagactctttccaaaatgcccatggctgacgggctgaagccgctgaaaaacttctcctcgctccaggagcttctatcccttgggggagagcgcctcctaacggacttggtgcgggaaaatatccatgtaagggaaatgatgaacgaagtggcccccctactccgggaggacggcagctgtcgctccctaaactaccatctgcaacccgtaattggggtcatttacggtcccactgggtgcggcaagtctcagctgcttaggaatttgctctcatcccagttaatcaccccggctccagaaacggtattttttatagccccgcaggtggacatgatccccccctctgaactgaaagcctgggaaatgcaaatatgtgaggggaactatgctcccgggccagagggaactttcatcccccaatctggcaccctccgcccaaagtttattaaaatggcttatgatgacctgactcaggagcataactatgatgtttcagacccccggaacgtgttcgcccgtgccgctgcccacggccccatcgctatcattatggatgagtgcatggagaatctggggggtcacaaaggcgtctccaaattttttcatgcttttccctctaagctgcatgataaatttcccaagtgcaccggatacactgtcttagtggtcctgcacaatatgaacccgagacgggatctaggcggcaacattgccaacctcaagatccagtccaaaatgcatataatttcaccccggatgtacccgtcccagctcaatagatttgtaaacacctacactaagggcctccccgttgcaattagtctgctcctaaaagatattgtgcaacaccatgcactccgaccttgctatgactgggtgatttataacactaccccggagcaagaggctcttcaatggagctatctccacccccgagacggactaatgcctatgtatctaaacattcaatcccacctttacagggtactggaaaagatccaccgagttctcaatgatcgagaccgatggtccagggcataccgcgcgcgaaaaatcaaataaaca

SEQ ID NO: 278 - DNA, 4038 bp, Human adenovirus
  misc_feature 1..4038: note = Ad7 E3 corresponds to positions 27308-31345 in NCBI accession no. AC_000018
  source 1..4038: mol_type = genomic DNA
tataaaacgcctggtgatcagaggccgaggtatccagctcaacgacgagtcggttagctcttcgcttggtctgcgaccagacggagtcttccagatcgccggctgtgggagatcttccttcacccctcgtcaggctgtactgactttggagagttcgtcctcgcagccccgctcgggcggcatcggaactctccagttcgtggaggagtttactccctctgtctacttcaaccccttctccggctctcctggccagtacccagacgagttcataccgaacttcgacgcaatcagcgagtcagtggatggctatgattgatgtctaatggtggcgcggctgagctagctcgactgcgacacctagaccactgccgccgctttcgctgcttcgcccgggaactcaccgagttcatctacttcgaactccccgaggagcaccctcagggtccggcccacggagtgcggattaccatcgaagggggaatagactctcgcctgcatcgaatcttctcccagcgacccgtgctgattgagcgcgaccagggaaatacaaccatctccatttactgcatctgtaaccaccccggattgcatgaaagcctttgctgtcttgtttgtgctgagtttaataaaaactgagttaagaccctcctacggactaccgcttcttcaatcaggactttacaacaccaaccagatcttccagaagacccagacccttcctcctctgatccaggactctaactctaccttaccagcaccatccactactaaccttcccgaaactaacaagcttggatctcatctgcaacaccgcctttcacgaagccttctttctgccaatactaccactcccaaaaccggaggtgagctccgcggtctccctactgacgacccctgggtggtagcgggttttgtaacgttaggagtagttgcgggtgggcttgtgctaatcctttgctacctatacataccttgctgtgcatatttagtcatattgcgctgttggtttaaaaaatgggggccatattagtcgtgcttgctttactttcgcttttgggtctgggctctgctaatctcaatcctcttgatcacgatccatgtctagacttcgacccagaaaactgcacacttacttttgcacccgacacaagccgtctctgtggagttcttattaagtgcggatgggactgcaggtccgttgaaattacacataataataaaacatggaacaataccttatccaccacatgggagccaggagttcccgagtggtatactgtctctgtccgaggtcctgacggttccatccgcattagtaacaacacttttattttttctgaaatgtgcgatctggccatgttcatgagcagacagtatgacctatggcctcccagcaaagagaacattgtggcattttccattgcttattgcttggtaacatgcatcatcactgctatcatttgtgtgtgcatacacttgcttatagttattcgccctagacaaagcaataaggaaaaagagaaaatgccttaacctttttactcataccttttctttacagcatggcttttgttacagctctaattattgccaacattgtcactgtcgctcacgggcaaacaattatccatattaccttaggacataatcacacccttgtagggcccccaattacttcagaggttatttggaccaaacttggaagtgttgattattttgatataatttgcaacaaaactaaaccaatatttgtaatctgtaacagacaaaatctcacgttaattaatgttagcaaaatttataacggttactattatggttatgacagatccagtagtcaatataaaaattacttagttcgcataactcagcccaaattaacagtgcccactatgacaataattaaaatggctaataaagcattagaaaattttacatcaccaacaacgcccaatgaaaaaaacattccaaattcaatgattgcaattattgcggcggtggcattgggaatggcactaataataatatgcatgttcctatatgcttgttgctataaaaagtttcaacataaacaggatccactactaaattttaacatttaattttttatacagatgttttccactacaatttttatcattactagccttgcagctgtaacttatggccgttcacacctaactctacctgttggctcaacatgtacactacaaggaccccaacaaggctatgtcacttggtggagaatatatgataatggagggttcgctagaccatgtgatcagcctggtacaaaattttcatgcaacggaagagacttgaccataattaacataacatcaaatgagcaaggcttctattatggaaccaactataaagatagtttagattacaacattattgtagtgccagccaccacttctgctccccgcaaaaccactttctctagcagcagtgccaaagcaagcacaattcctaaaacagcttctgctatgttaaagcttcaaaaaatcgctttaaataattccacagccgctcccaatacaattcctaaatcaacaattggcatcattactgccgtggtagtgggattaattattatatttttgtgcataatgtactatgcctgctgctatagaaaacatgaacaaaaaggtgatgcattactaaattttgacatttaattttttatagaattatgatattgtttcaatcaaataccactaacactatcaatgtgcagactactttaaatcatgacatggaaaaccacactacctcctatgcatacacaaacattcagcctaaatacgctatgcaatagaaattctaaaagacgtcccatctattctcctatgattagtcgtccccatatggctttgaatgaaatctaagatcttttttttttttctcttacagtatggtgaacaccaatcatgatccctagaaatttcttcttcaccatactcatctgtgctttcaatgtctgtgctactttcacagcagtagccactgcaagcccagactgtataggaccatttgcttcctatgcactttttgccttcgttacttgcatctgcgtgtgtagcatagtctgcctggttattaattttttccaactggtagactggatctttgtacgaattgcctacctacgtcaccatcccgaataccgcaatcaaaatgttgcggcacttcttaggcttatttaaaaccatgcaggctatgctaccagtcattttaattctgctactaccctgcattgccctagcttccaccgccactcgcgctacacctgaacaacttagaaaatgcaaatttcaacaaccatggtcatttcttgattgctaccatgaaaaatctgatttccccacatactggatagtgattgttggaataattaacatactttcatgtacctttttctcaatcacaatataccccacatttaattttgggtggaattctcccaatgcactgggttacccacaagaaccagatgaacatatcccactacaacacatacaacaaccactagcactggtagagtatgaaaatgagccacaaccttcactacctcctgccattagttacttcaacctaaccggcggagatgactgaaatactcaccacctccaattccgccgaggatctgcttgatatggacggccgcgtctcagaacagcgactcgcccaactacgcatccgccagcagcaggaacgcgtgaccaaagagctcagagatgtcatccaaattcaccaatgcaaaaaaggcatattttgcttggtaaaacaagccaagatatcctacgagatcaccgctactgaccatcgcctctcttacgaacttggcccccaacgacaaaaatttacatgcatggtgggaatcacccctatagttatcactcagcaaagtggagatactaaggggtgcattcactgctcttgcgattccatcgagtgcacctacaccctgctaaagaccctatgcggcctaagagacctgctacccatgaattaaaaattaataaaaaa

SEQ ID NO: 279 - DNA, 978 bp, Human adenovirus
  misc_feature 1..978: note = Ad7 fiber corresponds to positions 31529-32506 in NCBI accession no. AC_000018
  source 1..978: mol_type = genomic DNA
atgaccaagagagtccggctcagtgattccttcaaccctgtctacccctatgaagatgaaagcacctcccaacacccctttataaacccagggtttatttccccaaatggctttacacaaagcccagacggagttcttactttaaaatgtttaaccccactaacaaccacaggcgggtctctacagttaaaagtgggagggggtcttacaatagatgacaccgacggttttttgaaagaaaacataagtgccaccacaccactcgttaagactggtcactctataggtttgtcgctaggacccggattaggaacaaatgaaaacaaactttgtgccaaattgggagaaggacttacattcaattccaacaacatttgcattaatgacaatattaacaccctatggacaggagttaaccccaccagagccaactgtcaaataatggcctccagtgaatctaatgattgcaaattaattctaacactagttaaaactggagccctcgtcactgcatttgtttatgttataggagtatctaacgattttaatatgctaactacacataaaaatataaatttcactgcagagctgttttttgattctactggtaatttattaactagcctttcatccctaaaaactccacttaatcataaatcagggcaaaacatggctactggtgcccttactaatgctaaaggtttcatgcccagcacaactgcctatcctttcaatgttaattccagagaaaaagaaaactacatttacggaacttgttactacacagctagtgatcacactgcttttcccattgacatatctgtcatgcttaaccaaagagcattaaataatgagacatcatattgtattcgtgtaacttggtcctggaatacaggagttgccccagaagtgcaaacctctgctactaccctagtcacctctccatttaccttttactacattagagaagacgactga

SEQ ID NO: 280 - DNA, 126 bp, Human adenovirus; identical to SEQ ID NO: 198
  misc_feature 1..126: note = Ad7 fiber tail corresponds to positions 31529-31654 in NCBI accession no. AC_000018
  source 1..126: mol_type = genomic DNA

SEQ ID NO: 281 - DNA, 273 bp, Human adenovirus
  misc_feature 1..273: note = Ad7 fiber shaft corresponds to positions 31655-31927 in NCBI accession no. AC_000018
  source 1..273: mol_type = genomic DNA
gacggagttcttactttaaaatgtttaaccccactaacaaccacaggcgggtctctacagttaaaagtgggagggggtcttacaatagatgacaccgacggttttttgaaagaaaacataagtgccaccacaccactcgttaagactggtcactctataggtttgtcgctaggacccggattaggaacaaatgaaaacaaactttgtgccaaattgggagaaggacttacattcaattccaacaacatttgcattaatgacaatattaacacc

SEQ ID NO: 282 - DNA, 576 bp, Human adenovirus
  misc_feature 1..576: note = Ad7 fiber knob corresponds to positions 31928-32503 in NCBI accession no. AC_000018
  source 1..576: mol_type = genomic DNA
ctatggacaggagttaaccccaccagagccaactgtcaaataatggcctccagtgaatctaatgattgcaaattaattctaacactagttaaaactggagccctcgtcactgcatttgtttatgttataggagtatctaacgattttaatatgctaactacacataaaaatataaatttcactgcagagctgttttttgattctactggtaatttattaactagcctttcatccctaaaaactccacttaatcataaatcagggcaaaacatggctactggtgcccttactaatgctaaaggtttcatgcccagcacaactgcctatcctttcaatgttaattccagagaaaaagaaaactacatttacggaacttgttactacacagctagtgatcacactgcttttcccattgacatatctgtcatgcttaaccaaagagcattaaataatgagacatcatattgtattcgtgtaacttggtcctggaatacaggagttgccccagaagtgcaaacctctgctactaccctagtcacctctccatttaccttttactacattagagaagacgac

SEQ ID NO: 283 - DNA, 1635 bp, Human adenovirus
  misc_feature 1..1635: note = Ad7 penton corresponds to positions 14153-15787 in NCBI accession no. AC_000018
  source 1..1635: mol_type = genomic DNA
atgaggagacgagccgtgctaggcggagcggtggtgtatccggagggtcctcctccttcttacgagagcgtgatgcagcaacaggcggcgatgatacagcccccactggaggttcccttcgtacccccgcggtacctggcgcctacggaagggagaaacagcattcgttactcggagctgtcgcccctgtacgataccaccaagttgtatctggttgacaacaagtcggcggacatcgcctccctgaactatcagaacgaccacagcaacttcctgaccacggtggtgcagaacaatgactttacccccacggaggctagcacccagaccatcaactttgacgaacggtcgcgatggggcggtcatctgaagaccatcatgcacaccaacatgcccaacgtgaacgagtacatgttcagcaacaagttcaaggcgagggtgatggtgtccagaaaagctcctgaaggtgttacagtaaatgacacctatgatcataaagaggatatcttgaagtatgagtggtttgagttcattttaccagaaggcaacttttcagccaccatgacgatcgacctgatgaacaatgccatcattgacaactacctggaaattggcagacagaatggagtgctggaaagtgacattggtgttaagtttgacactagaaatttcaggctcgggtgggaccccgaaactaagttgattatgccaggagtctacacttatgaggcattccatcctgacattgtattgctgcctggttgcggggtagactttactgaaagccgacttagcaacttgcttggcatcaggaagagacatccattccaggagggtttcaaaatcatgtatgaagatcttgaagggggtaatattcctgcccttttggatgtcactgcctatgaggaaagcaaaaaggataccactactgaaacaaccacactggctgttgcagaggaaactagtgaagatgataatataactagaggagatacctatataacagaaaaacacaaacgtgaagctgcagctgctgaagttaaaaaagagttaaagatccaacctctagaaaaagacagcaagagtagaagctacaatgtcttggaagacaaaatcaacacggcctaccgcagttggtacctgtcctacaattacggtaaccctaagaaaggaataaggtcttggacactgctcaccacttcagatgtcacctgtggggcagagcaggtttactggtcgctccctgacatgatgcaagacccagtcacgttccgctccacaagacaagtcaacaactacccagtggtgggtgcagagcttatgcccgtcttctcaaagagtttctacaatgagcaagccgtgtactctcagcagctccgacaggccacttcgctcacgcacgtcttcaaccgcttccctgagaaccagatcctcatccgcccgccggcgcccacaattaccaccgtcagtgaaaacgttcctgctctcacagatcacgggaccctgccgttacgcagcagtatccggggagtccagcgcgtgaccgttactgacgccagacgccgcacctgtccctacgtttacaaggccctgggcatagtcgcgccgcgcgttctttcaagccgcactttctaa

SEQ ID NO: 284 - DNA, 2805 bp, Human adenovirus
  misc_feature 1..2805: note = Ad7 hexon corresponds to positions 18666-21470 in NCBI accession no. AC_000018
  source 1..2805: mol_type = genomic DNA
atggccaccccatcgatgatgccccaatgggcatacatgcacatcgccggacaggatgcttcggagtacctgagtccgggtctggtgcagttcgcccgtgcaacagacacctacttcagtatggggaacaagtttagaaaccccacagtggcgcccacccacgatgtgaccaccgaccgtagccagcgactgatgctgcgcttcgtgcccgttgaccgggaggacaatacatactcttacaaagtgcggtacaccctcgccgtgggcgacaacagagtgcttgacatggccagcacattctttgacattaggggggtgcttgatagaggtcctagcttcaagccatattccggcacagcttacaattcactggctcctaagggcgcgcctaacacatctcagtggatagttacaacgggagaagacaatgccaccacatacacatttggcattgcttccacgaagggagacaatattactaaggaaggtttagaaattgggaaagacattactgcagacaacaagcccatttatgccgataaaacatatcagccagagcctcaagttggagaagaatcatggactgatattgatggaacaaatgaaaaatttggaggtagagctcttaaaccagctactaaaatgaagccatgctacgggtcttttgcaagacctacaaacataaaagggggccaagctaaaaacagaaaagtaacaccaaccgaaggagatgttgaagctgaggagccagatattgatatggaatttttcgatggtagagaagctgctgacgctttttcgcctgaaattgtgctttacacggaaaatgtcaatttggaaactccagacagccatgtggtatacaagccaggaacttctgatggtaactctcatgcaaatttgggtcaacaagccatgcctaacagacccaattacattggcttcagggataactttgtaggtcttatgtactacaacagtactggaaatatgggagttttggccggccaagcatcacaactgaatgcagtggttgacttgcaggacagaaacactgaactgtcatatcagcttttgcttgattctctgggagacagaagcagatacttcagcatgtggaatcaggctgtggacagctatgatcccgatgttcgtattattgaaaatcatggcgtcgaggatgaactgcctaattactgttttcctctggatggcataggaccagggaacaaatatcaaggcattaaacctagagacactgcatgggaaaaagatactaaagtttctacagctaatgaaatagccataggcaacaatctggctatggaaattaatatccaagctaatctttggagaagttttctgtactccaatgtggctttgtaccttccagatgtttacaagtacacgccaactaacattactctgcccgctaacaccaacacctatgagtacatgaacgggcgagtggtttccccatctctggtcgattcatacatcaacattggcgccaggtggtctcttgacccaatggacaatgtgaatccatttaaccaccaccgcaatgctggcctacgctaccggtccatgcttctgggcaatggccgttatgtgcctttccacatacaagtgcctcaaaaattctttgctgtcaagaacctacttcttctacctggctcctacacctatgagtggaacttcagaaaggatgtgaacatggtcctgcaaagttcccttggaaatgacctcagaacagatggtgctaacataagtttcaccagcatcaacctctatgccaccttcttccccatggctcacaacaccgcttcaactcttgaagccatgctgcgcaacgataccaatgatcagtcattcaacgactacctctctgcagctaacatgctttaccccatccctgccaatgcaaccaacattccaatttccatcccatctcgcaactgggcagccttcaggggctggtccttcaccagactcaaaaccaaggagactccatctcttggatcagggttcgatccctacttcgtttattctggatctattccctacctggatggcactttttaccttaaccacactttcaagaaggtctccatcatgtttgactcctcagtcagctggcctggcaatgacaggctgttgtctccaaatgagtttgaaatcaagcgcactgtggatggggaaggatacaatgtggcccaatgcaacatgaccaaagactggttcctggttcagatgcttgccaactacaacattggctaccagggcttttacatccctgagggatacaaggatcgcatgtactcctttttcagaaacttccagcctatgagcaggcaggtggttgatgaggttaattacactgactacaaagccgtcaccttaccatatcaacacaacaactctggctttgtaggataccttgcgcctactatgagacaaggggaaccttacccagccaattatccatacccgctcatcggaactactgccgttaaaagtgttacccaaaaaaagttcctgtgcgacaggaccatgtggcgcataccgttctccagcaacttcatgtccatgggagcccttacggacctgggacagaacctgctctatgccaactcggcccatgcgctggacatgacttttgaggtggatcccatggatgagcccaccctgctttatcttcttttcgaagtcttcgacgtggtcagagtgcaccagccacaccgcggcgtcatcgaggccgtctacctgcgcacaccgttctcggccggcaacgccaccacataa

SEQ ID NO: 285 - DNA, 34794 bp, Human adenovirus; identical to SEQ ID NO: 88
  misc_feature 1..34794: note = Ad35 reference genome NCBI accession no. AC_000019
  source 1..34794: mol_type = genomic DNA

SEQ ID NO: 286 - DNA, 137 bp, Human adenovirus; identical to SEQ ID NO: 245
  misc_feature 1..137: note = Ad35 5  (left) ITR corresponds to positions 1-137 in NCBI accession no. AC_000019
  source 1..137: mol_type = genomic DNA

SEQ ID NO: 287 - DNA, 137 bp, Human adenovirus; identical to SEQ ID NO: 246
  misc_feature 1..137: note = Ad35 3  (right) ITR corresponds to positions 34658-34794 in NCBI accession no. AC_000019
  source 1..137: mol_type = genomic DNA

SEQ ID NO: 288 - DNA, 342 bp, Human adenovirus; identical to SEQ ID NO: 247
  misc_feature 1..342: note = Ad35 Packaging Sequence corresponds to positions 138-479 in NCBI accession no. AC_000019
  source 1..342: mol_type = genomic DNA

SEQ ID NO: 289 - DNA, 2921 bp, Human adenovirus
  misc_feature 1..2921: note = Ad35 E1 corresponds to positions 480-3400 in NCBI accession no. AC_000019
  source 1..2921: mol_type = genomic DNA
ttatacctcagggtttgtgtcaagaggccactcttgagtgccagcgagaagagttttctcctctgcgccggcagtttaataataaaaaaatgagagatttgcgatttctgcctcaggaaataatctctgctgagactggaaatgaaatattggagcttgtggtgcacgccctgatgggagacgatccggagccacctgtgcagctttttgagcctcctacgcttcaggaactgtatgatttagaggtagagggatcggaggattctaatgaggaagctgtgaatggcttttttaccgattctatgcttttagctgctaatgaaggattagaattagatccgcctttggacactttcaatactccaggggtgattgtggaaagcggtacaggtgtaagaaaattacctgatttgagttccgtggactgtgatttgcactgctatgaagacgggtttcctccgagtgatgaggaggaccatgaaaaggagcagtccatgcagactgcagcgggtgagggagtgaaggctgccaatgttggttttcagttggattgcccggagcttcctggacatggctgtaagtcttgtgaatttcacaggaaaaatactggagtaaaggaactgttatgttcgctttgttatatgagaacgcactgccactttatttacagtaagtgtgtttaagttaaaatttaaaggaatatgctgtttttcacatgtatattgagtgtgagttttgtgcttcttattataggtcctgtgtctgatgctgatgaatcaccatctcctgattctactacctcacctcctgatattcaagcacctgttcctgtggacgtgcgcaagcccattcctgtgaagcttaagcctgggaaacgtccagcagtggagaaacttgaggacttgttacagggtggggacggacctttggacttgagtacacggaaacgtccaagacaataagtgttccatatccgtgtttacttaaggtgacgtcaatatttgtgtgagagtgcaatgtaataaaaatatgttaactgttcactggtttttattgctttttgggcggggactcaggtatataagtagaagcagacctgtgtggttagctcataggagctggctttcatccatggaggtttgggccattttggaagaccttaggaagactaggcaactgttagagagcgcttcggacggagtctccggtttttggagattctggttcgctagtgaattagctagggtagtttttaggataaaacaggactataaacaagaatttgaaaagttgttggtagattgcccaggactttttgaagctcttaatttgggccatcaggttcactttaaagaaaaagttttatcagttttagacttttcaaccccaggtagaactgctgctgctgtggcttttcttacttttatattagataaatggatcccgcagactcatttcagcaggggatacgttttggatttcatagccacagcattgtggagaacatggaaggttcgcaagatgaggacaatcttaggttactggccagtgcagcctttgggtgtagcgggaatcctgaggcatccaccggtcatgccagcggttctggaggaggaacagcaagaggacaacccgagagccggcctggaccctccagtggaggaggcggagtagctgacttgtctcctgaactgcaacgggtgcttactggatctacgtccactggacgggataggggcgttaagagggagagggcatccagtggtactgatgctagatctgagttggctttaagtttaatgagtcgcagacgtcctgaaaccatttggtggcatgaggttcagaaagagggaagggatgaagtttctgtattgcaggagaaatattcactggaacaggtgaaaacatgttggttggagccagaggatgattgggcggtggccattaaaaattatgccaagatagctttgaggcctgataaacagtataagatcagtagacggattaatatccggaatgcttgttacatatctggaaatggggctgaggtggtaatagatactcaagacaagacagttattagatgctgcatgatggatatgtggcctggagtagtcggtatggaagcagtcacttttgtaaatgttaagtttaggggagatggttataatggaatagtgtttatggccaataccaaacttatattgcatggttgtagcttttttggtttcaacaatacctgtgtagatgcctggggacaggttagtgtacgggggtgtagtttctatgcgtgttggattgccacagctggcagaaccaagagtcaattgtctctgaagaaatgcatattccaaagatgtaacctgggcattctgaatgaaggcgaagcaagggtccgtcactgcgcttctacagatactggatgttttattttaattaagggaaatgccagcgtaaagcataacatgatttgtggtgcttccgatgagaggccttatcaaatgctcacttgtgctggtgggcattgtaatatgctggctactgtgcatattgtttcccatcaacgcaaaaaatggcctgtttttgatcacaatgtgttgaccaagtgcaccatgcatgcaggtgggcgtagaggaatgtttatgccttaccagtgtaacatgaatcatgtgaaagtgttgttggaaccagatgccttttccagaatgagcctaacaggaatctttgacatgaacacgcaaatctggaagatcctgaggtatgatgatacgagatcgagggtgcgcgcatgcgaatgcggaggcaagcatgccaggttccagccggtgtgtgtagatgtgaccgaagatctcagaccggatcatttggttattgcccgcactggagcagagttcggatccagtggagaagaaactgactaa

SEQ ID NO: 290 - DNA, 19451 bp, Human adenovirus
  misc_feature 1..19451: note = Ad35 E2 corresponds to positions 3966-23416 in NCBI accession no. AC_000019
  source 1..19451: mol_type = genomic DNA
ttatttcatttttcgcgcacggtatgccctggaccaccgatctcgatcattgagaactcggtggattttttccagaatcctatagaggtgggattgaatgtttagatacatgggcattaggccgtctttggggtggagatagctccattgaagggattcatgctccggggtagtgttgtaaatcacccagtcataacaaggtcgcagtgcatggtgttgcacaatatcttttagaagtaggctgattgccacagataagcccttggtgtaggtgtttacaaaccggttgagctgggaggggtgcattcgaggtgaaattatgtgcattttggattggatttttaagttggcaatattgccgccaagatcccgtcttgggttcatgttatgaaggactaccaagacggtgtatccggtacatttaggaaatttatcgtgcagcttggatggaaaagcgtggaaaaatttggagacacccttgtgtcctccgagattttccatgcactcatccatgataatagcaatggggccgtgggcagcggcgcgggcaaacacgttccgtgggtctgacacatcatagttatgttcctgagttaaatcatcataagccattttaatgaatttggggcggagcgtaccagattggggtatgaatgttccttcgggccccggagcatagttcccctcacagatttgcatttcccaagctttcagttctgagggtggaatcatgtccacctggggggctatgaagaacaccgtttcgggggcgggggtgattagttgggatgatagcaagtttctgagcaattgagatttgccacatccggtggggccataaataattccgattacaggttgcaggtggtagtttagggaacggcaactgccgtcttctcgaagcaagggggccacctcgttcatcatttcccttacatgcatattttcccgcaccaaatccattaggaggcgctctcctcctagtgatagaagttcttgtagtgaggaaaagtttttcagcggttttagaccgtcagccatgggcattttggaaagagtttgctgcaaaagttctagtctgttccacagttcagtgatgtgttctatggcatctcgatccagcagacctcctcgtttcgcgggtttggacggctcctggagtagggtatgagacgatgggcgtccagcgctgccagggttcggtccttccagggtctcagtgttcgagtcagggttgtttccgtcacagtgaaggggtgtgcgcctgcttgggcgcttgccagggtgcgcttcagactcattctgctggtggagaacttctgtcgcttggcgccctgtatgtcggccaagtagcagtttaccatgagttcgtagttgagcgcctcggctgcgtggcctttggcgcggagcttacctttggaagttttcttgcataccgggcagtataggcatttcagcgcatacagcttgggcgcaaggaaaatggattctggggagtatgcatccgcgccgcaggaggcgcaaacagtttcacattccaccagccaggttaaatccggttcattggggtcaaaaacaagttttccgccatattttttgatgcgtttcttacctttggtctccataagttcgtgtcctcgttgagtgacaaacaggctgtccgtatctccgtagactgattttacaggcctcttctccagtggagtgcctcggtcttcttcgtacaggaactctgaccactctgatacaaaggcgcgcgtccaggccagcacaaaggaggctatgtgggaggggtagcgatcgttgtcaaccagggggtccaccttttccaaagtatgcaaacacatgtcaccctcttcaacatccaggaatgtgattggcttgtaggtgtatttcacgtgacctggggtccccgctgggggggtataaaagggggcggttctttgctcttcctcactgtcttccggatcgctgtccaggaacgtcagctgttggggtaggtattccctctcgaaggcgggcatgacctctgcactcaggttgtcagtttctaagaacgaggaggatttgatattgacagtgccggttgagatgcctttcatgaggttttcgtccatttggtcagaaaacacaatttttttattgtcaagtttggtggcaaatgatccatacagggcgttggataaaagtttggcaatggatcgcatggtttggttcttttccttgtccgcgcgctctttggcggcgatgttgagttggacatactcgcgtgccaggcacttccattcggggaagatagttgttaattcatctggcacgattctcacttgccaccctcgattatgcaaggtaattaaatccacactggtggccacctcgcctcgaaggggttcattggtccaacagagcctacctcctttcctagaacagaaagggggaagtgggtctagcataagttcatcgggagggtctgcatccatggtaaagattcccggaagtaaatccttatcaaaatagctgatgggagtggggtcatctaaggccatttgccattctcgagctgccagtgcgcgctcatatgggttaaggggactgccccagggcatgggatgggtgagagcagaggcatacatgccacagatgtcatagacgtagatgggatcctcaaagatgcctatgtaggttggatagcatcgcccccctctgatacttgctcgcacatagtcatatagttcatgtgatggcgctagcagccccggacccaagttggtgcgattgggtttttctgttctgtagacgatctggcgaaagatggcgtgagaattggaagagatggtgggtctttgaaaaatgttgaaatgggcatgaggtagacctacagagtctctgacaaagtgggcataagattcttgaagcttggttaccagttcggcggtgacaagtacgtctagggcgcagtagtcaagtgtttcttgaatgatgtcataacctggttggtttttcttttcccacagttcgcggttgagaaggtattcttcgcgatccttccagtactcttctagcggaaacccgtctttgtctgcacggtaagatcctagcatgtagaactgattaactgccttgtaagggcagcagcccttctctacgggtagagagtatgcttgagcagcttttcgtagcgaagcgtgagtaagggcaaaggtgtctctgaccatgactttgagaaattggtatttgaagtccatgtcgtcacaggctccctgttcccagagttggaagtctacccgtttcttgtaggcggggttgggcaaagcgaaagtaacatcattgaagagaatcttaccggctctgggcataaaattgcgagtgatgcggaaaggctgtggtacttccgctcgattgttgatcacctgggcagctaggacgatttcgtcgaaaccgttgatgttgtgtcctacgatgtataattctatgaaacgcggcgtgcctctgacgtgaggtagcttactgagctcatcaaaggttaggtctgtggggtcagataaggcgtagtgttcgagagcccattcgtgcaggtgaggatttgcatgtaggaatgatgaccaaagatctaccgccagtgctgtttgtaactggtcccgatactgacgaaaatgccggccaattgccattttttctggagtgacacagtagaaggttctggggtcttgttgccatcgatcccacttgagtttaatggctagatcgtgggccatgttgacgagacgctcttctcctgagagtttcatgaccagcatgaaaggaactagttgtttgccaaaggatcccatccaggtgtaagtttccacatcgtaggtcaggaagagtctttctgtgcgaggatgagagccgatcgggaagaactggatttcctgccaccagttggaggattggctgttgatgtgatggaagtagaagtttctgcggcgcgccgagcattcgtgtttgtgcttgtacagacggccgcagtagtcgcagcgttgcacgggttgtatctcgtgaatgagctgtacctggcttcccttgacgagaaatttcagtgggaagccgaggcctggcgattgtatctcgtgctcttctatattcgctgtatcggcctgttcatcttctgtttcgatggtggtcatgctgacgagcccccgcgggaggcaagtccagacctcggcgcgggaggggcggagctgaaggacgagagcgcgcaggctggagctgtccagagtcctgagacgctgcggactcaggttagtaggtagggacagaagattaacttgcatgatcttttccagggcgtgcgggaggttcagatggtacttgatttccacaggttcgtttgtagagacgtcaatggcttgcagggttccgtgtcctttgggcgccactaccgtacctttgttttttcttttgatcggtggtggctctcttgcttcttgcatgctcagaagcggtgacggggacgcgcgccgggcggcagcggttgttccggacccgggggcatggctggtagtggcacgtcggcgccgcgcacgggcaggttctggtattgcgctctgagaagacttgcgtgcgccaccacgcgtcgattgacgtcttgtatctgacgtctctgggtgaaagctaccggccccgtgagcttgaacctgaaagagagttcaacagaatcaatttcggtatcgttaacggcagcttgtctcagtatttcttgtacgtcaccagagttgtcctggtaggcgatctccgccatgaactgctcgatttcttcctcctgaagatctccgcgacccgctctttcgacggtggccgcgaggtcattggagatacggcccatgagttgggagaatgcattcatgcccgcctcgttccagacgcggctgtaaaccacggccccctcggagtctcttgcgcgcatcaccacctgagcgaggttaagctccacgtgtctggtgaagaccgcatagttgcataggcgctgaaaaaggtagttgagtgtggtggcaatgtgttcggcgacgaagaaatacatgatccatcgtctcagcggcatttcgctaacatcgcccagagcttccaagcgctccatggcctcgtagaagtccacggcaaaattaaaaaactgggagtttcgcgcggacacggtcaattcctcctcgagaagacggatgagttcggctatggtggcccgtacttcgcgttcgaaggctcccgggatctcttcttcctcttctatctcttcttccactaacatctcttcttcgtcttcaggcgggggcggagggggcacgcggcgacgtcgacggcgcacgggcaaacggtcgatgaatcgttcaatgacctctccgcggcggcggcgcatggtttcagtgacggcgcggccgttctcgcgcggtcgcagagtaaaaacaccgccgcgcatctccttaaagtggtgactgggaggttctccgtttgggagggagagggcgctgattatacattttattaattggcccgtagggactgcgcgcagagatctgatcgtgtcaagatccacgggatctgaaaacctttcgacgaaagcgtctaaccagtcacagtcacaaggtaggctgagtacggcttcttgtgggcgggggtggttatgtgttcggtctgggtcttctgtttcttcttcatctcgggaaggtgagacgatgctgctggtgatgaaattaaagtaggcagttctaagacggcggatggtggcgaggagcaccaggtctttgggtccggcttgctggatacgcaggcgattggccattccccaagcattatcctgacatctagcaagatctttgtagtagtcttgcatgagccgttctacgggcacttcttcctcacccgttctgccatgcatacgtgtgagtccaaatccgcgcattggttgtaccagtgccaagtcagctacgactctttcggcgaggatggcttgctgtacttgggtaagggtggcttgaaagtcatcaaaatccacaaagcggtggtaagcccctgtattaatggtgtaagcacagttggccatgactgaccagttaactgtctggtgaccagggcgcacgagctcggtgtatttaaggcgcgaataggcgcgggtgtcaaagatgtaatcgttgcaggtgcgcaccagatactggtaccctataagaaaatgcggcggtggttggcggtagagaggccatcgttctgtagctggagcgccaggggcgaggtcttccaacataaggcggtgatagccgtagatgtacctggacatccaggtgattcctgcggcggtagtagaagcccgaggaaactcgcgtacgcggttccaaatgttgcgtagcggcatgaagtagttcattgtaggcacggtttgaccagtgaggcgcgcgcagtcattgatgctctatagacacggagaaaatgaaagcgttcagcgactcgactccgtagcctggaggaacgtgaacgggttgggtcgcggtgtaccccggttcgagacttgtactcgagccggccggagccgcggctaacgtggtattggcactcccgtctcgacccagcctacaaaaatccaggatacggaatcgagtcgttttgctggtttccgaatggcagggaagtgagtcctattttttttttttttttgccgctcagatgcatcccgtgctgcgacagatgcgcccccaacaacagcccccctcgcagcagcagcagcagcaaccacaaaaggctgtccctgcaactactgcaactgccgccgtgagcggtgcgggacagcccgcctatgatctggacttggaagagggcgaaggactggcacgtctaggtgcgccttcgcccgagcggcatccgcgagttcaactgaaaaaagattctcgcgaggcgtatgtgccccaacagaacctatttagagacagaagcggcgaggagccggaggagatgcgagcttcccgctttaacgcgggtcgtgagctgcgtcacggtttggaccgaagacgagtgttgcgagacgaggatttcgaagttgatgaagtgacagggatcagtcctgccagggcacacgtggctgcagccaaccttgtatcggcttacgagcagacagtaaaggaagagcgtaacttccaaaagtcttttaataatcatgtgcgaaccctgattgcccgcgaagaagttacccttggtttgatgcatttgtgggatttgatggaagctatcattcagaaccctactagcaaacctctgaccgcccagctgtttctggtggtgcaacacagcagagacaatgaggctttcagagaggcgctgctgaacatcaccgaacccgaggggagatggttgtatgatcttatcaacattctacagagtatcatagtgcaggagcggagcctgggcctggccgagaaggtagctgccatcaattactcggttttgagcttgggaaaatattacgctcgcaaaatctacaagactccatacgttcccatagacaaggaggtgaagatagatgggttctacatgcgcatgacgctcaaggtcttgaccctgagcgatgatcttggggtgtatcgcaatgacagaatgcatcgcgcggttagcgccagcaggaggcgcgagttaagcgacagggaactgatgcacagtttgcaaagagctctgactggagctggaaccgagggtgagaattacttcgacatgggagctgacttgcagtggcagcctagtcgcagggctctgagcgccgcgacggcaggatgtgagcttccttacatagaagaggcggatgaaggcgaggaggaagagggcgagtacttggaagactgatggcacaacccgtgttttttgctagatggaacagcaagcaccggatcccgcaatgcgggcggcgctgcagagccagccgtccggcattaactcctcggacgattggacccaggccatgcaacgtatcatggcgttgacgactcgcaaccccgaagcctttagacagcaaccccaggccaaccgtctatcggccatcatggaagctgtagtgccttcccgatctaatcccactcatgagaaggtcctggccatcgtgaacgcgttggtggagaacaaagctattcgtccagatgaggccggactggtatacaacgctctcttagaacgcgtggctcgctacaacagtagcaatgtgcaaaccaatttggaccgtatgataacagatgtacgcgaagccgtgtctcagcgcgaaaggttccagcgtgatgccaacctgggttcgctggtggcgttaaatgctttcttgagtactcagcctgctaatgtgccgcgtggtcaacaggattatactaactttttaagtgctttgagactgatggtatcagaagtacctcagagcgaagtgtatcagtccggtcctgattacttctttcagactagcagacagggcttgcagacggtaaatctgagccaagcttttaaaaaccttaaaggtttgtggggagtgcatgccccggtaggagaaagagcaaccgtgtctagcttgttaactccgaactcccgcctgttattactgttggtagctcctttcaccgacagcggtagcatcgaccgtaattcctatttgggttacctactaaacctgtatcgcgaagccatagggcaaagtcaggtggacgagcagacctatcaagaaattacccaagtcagtcgcgctttgggacaggaagacactggcagtttggaagccactctgaacttcttgcttaccaatcggtctcaaaagatccctcctcaatatgctcttactgcggaggaggagaggatccttagatatgtgcagcagagcgtgggattgtttctgatgcaagagggggcaactccgactgcagcactggacatgacagcgcgaaatatggagcccagcatgtatgccagtaaccgacctttcattaacaaactgctggactacttgcacagagctgccgctatgaactctgattatttcaccaatgccatcttaaacccgcactggctgcccccacctggtttctacacgggcgaatatgacatgcccgaccctaatgacggatttctgtgggacgacgtggacagcgatgttttttcacctctttctgatcatcgcacgtggaaaaaggaaggcggtgatagaatgcattcttctgcatcgctgtccggggtcatgggtgctaccgcggctgagcccgagtctgcaagtccttttcctagtctacccttttctctacacagtgtacgtagcagcgaagtgggtagaataagtcgcccgagtttaatgggcgaagaggagtacctaaacgattccttgctcagaccggcaagagaaaaaaatttcccaaacaatggaatagaaagtttggtggataaaatgagtagatggaagacttatgctcaggatcacagagacgagcctgggatcatggggactacaagtagagcgagccgtagacgccagcgccatgacagacagaggggtcttgtgtgggacgatgaggattcggccgatgatagcagcgtgttggacttgggtgggagaggaaggggcaacccgtttgctcatttgcgccctcgcttgggtggtatgttgtgaaaaaaaataaaaaagaaaaactcaccaaggccatggcgacgagcgtacgttcgttcttctttattatctgtgtctagtataatgaggcgagtcgtgctaggcggagcggtggtgtatccggagggtcctcctccttcgtacgagagcgtgatgcagcagcagcaggcgacggcggtgatgcaatccccactggaggctccctttgtgcctccgcgatacctggcacctacggagggcagaaacagcattcgttactcggaactggcacctcagtacgataccaccaggttgtatctggtggacaacaagtcggcggacattgcttctctgaactatcagaatgaccacagcaacttcttgaccacggtggtgcagaacaatgactttacccctacggaagccagcacccagaccattaactttgatgaacgatcgcggtggggcggtcagctaaagaccatcatgcatactaacatgccaaacgtgaacgagtatatgtttagtaacaagttcaaagcgcgtgtgatggtgtccagaaaacctcccgacggtgctgcagttggggatacttatgatcacaagcaggatattttggaatatgagtggttcgagtttactttgccagaaggcaacttttcagttactatgactattgatttgatgaacaatgccatcatagataattacttgaaagtgggtagacagaatggagtgcttgaaagtgacattggtgttaagttcgacaccaggaacttcaagctgggatgggatcccgaaaccaagttgatcatgcctggagtgtatacgtatgaagccttccatcctgacattgtcttactgcctggctgcggagtggattttaccgagagtcgtttgagcaaccttcttggtatcagaaaaaaacagccatttcaagagggttttaagattttgtatgaagatttagaaggtggtaatattccggccctcttggatgtagatgcctatgagaacagtaagaaagaacaaaaagccaaaatagaagctgctacagctgctgcagaagctaaggcaaacatagttgccagcgactctacaagggttgctaacgctggagaggtcagaggagacaattttgcgccaacacctgttccgactgcagaatcattattggccgatgtgtctgaaggaacggacgtgaaactcactattcaacctgtagaaaaagatagtaagaatagaagctataatgtgttggaagacaaaatcaacacagcctatcgcagttggtatctttcgtacaattatggcgatcccgaaaaaggagtgcgttcctggacattgctcaccacctcagatgtcacctgcggagcagagcaggtttactggtcgcttccagacatgatgaaggatcctgtcactttccgctccactagacaagtcagtaactaccctgtggtgggtgcagagcttatgcccgtcttctcaaagagcttctacaacgaacaagctgtgtactcccagcagctccgccagtccacctcgcttacgcacgtcttcaaccgctttcctgagaaccagattttaatccgtccgccggcgcccaccattaccaccgtcagtgaaaacgttcctgctctcacagatcacgggaccctgccgttgcgcagcagtatccggggagtccaacgtgtgaccgttactgacgccagacgccgcacctgtccctacgtgtacaaggcactgggcatagtcgcaccgcgcgtcctttcaagccgcactttctaaaaaaaaaaaatgtccattcttatctcgcccagtaataacaccggttggggtctgcgcgctccaagcaagatgtacggaggcgcacgcaaacgttctacccaacatcccgtgcgtgttcgcggacattttcgcgctccatggggtgccctcaagggccgcactcgcgttcgaaccaccgtcgatgatgtaatcgatcaggtggttgccgacgcccgtaattatactcctactgcgcctacatctactgtggatgcagttattgacagtgtagtggctgacgctcgcaactatgctcgacgtaagagccggcgaaggcgcattgccagacgccaccgagctaccactgccatgcgagccgcaagagctctgctacgaagagctagacgcgtggggcgaagagccatgcttagggcggccagacgtgcagcttcgggcgccagcgccggcaggtcccgcaggcaagcagccgctgtcgcagcggcgactattgccgacatggcccaatcgcgaagaggcaatgtatactgggtgcgtgacgctgccaccggtcaacgtgtacccgtgcgcacccgtccccctcgcacttagaagatactgagcagtctccgatgttgtgtcccagcggcgaggatgtccaagcgcaaatacaaggaagaaatgctgcaggttatcgcacctgaagtctacggccaaccgttgaaggatgaaaaaaaaccccgcaaaatcaagcgggttaaaaaggacaaaaaagaagaggaagatggcgatgatgggctggcggagtttgtgcgcgagtttgccccacggcgacgcgtgcaatggcgtgggcgcaaagttcgacatgtgttgagacctggaacttcggtggtctttacacccggcgagcgttcaagcgctacttttaagcgttcctatgatgaggtgtacggggatgatgatattcttgagcaggcggctgaccgattaggcgagtttgcttatggcaagcgtagtagaataacttccaaggatgagacagtgtcaatacccttggatcatggaaatcccacccctagtcttaaaccggtcactttgcagcaagtgttacccgtaactccgcgaacaggtgttaaacgcgaaggtgaagatttgtatcccactatgcaactgatggtacccaaacgccagaagttggaggacgttttggagaaagtaaaagtggatccagatattcaacctgaggttaaagtgagacccattaagcaggtagcgcctggtctgggggtacaaactgtagacattaagattcccactgaaagtatggaagtgcaaactgaacccgcaaagcctactgccacctccactgaagtgcaaacggatccatggatgcccatgcctattacaactgacgccgccggtcccactcgaagatcccgacgaaagtacggtccagcaagtctgttgatgcccaattatgttgtacacccatctattattcctactcctggttaccgaggcactcgctactatcgcagccgaaacagtacctcccgccgtcgccgcaagacacctgcaaatcgcagtcgtcgccgtagacgcacaagcaaaccgactcccggcgccctggtgcggcaagtgtaccgcaatggtagtgcggaacctttgacactgccgcgtgcgcgttaccatccgagtatcatcacttaatcaatgttgccgctgcctccttgcagatatggccctcacttgtcgccttcgcgttcccatcactggttaccgaggaagaaactcgcgccgtagaagagggatgttgggacgcggaatgcgacgctacaggcgacggcgtgctatccgcaagcaattgcggggtggttttttaccagccttaattccaattatcgctgctgcaattggcgcgataccaggcatagcttccgtggcggttcaggcctcgcaacgacattgacattggaaaaaaaacgtataaataaaaaaaaatacaatggactctgacactcctggtcctgtgactatgttttcttagagatggaagacatcaatttttcatccttggctccgcgacacggcacgaagccgtacatgggcacctggagcgacatcggcacgagccaactgaacgggggcgccttcaattggagcagtatctggagcgggcttaaaaattttggctcaaccataaaaacatacgggaacaaagcttggaacagcagtacaggacaggcgcttagaaataaacttaaagaccagaacttccaacaaaaagtagtcgatgggatagcttccggcatcaatggagtggtagatttggctaaccaggctgtgcagaaaaagataaacagtcgtttggacccgccgccagcaaccccaggtgaaatgcaagtggaggaagaaattcctccgccagaaaaacgaggcgacaagcgtccgcgtcccgatttggaagagacgctggtgacgcgcgtagatgaaccgccttcttatgaggaagcaacgaagcttggaatgcccaccactagaccgatagccccaatggccaccggggtgatgaaaccttctcagttgcatcgacccgtcaccttggatttgccccctccccctgctgctactgctgtacccgcttctaagcctgtcgctgccccgaaaccagtcgccgtagccaggtcacgtcccgggggcgctcctcgtccaaatgcgcactggcaaaatactctgaacagcatcgtgggtctaggcgtgcaaagtgtaaaacgccgtcgctgcttttaattaaatatggagtagcgcttaacttgcctatctgtgtatatgtgtcattacacgccgtcacagcagcagaggaaaaaaggaagaggtcgtgcgtcgacgctgagttactttcaagatggccaccccatcgatgctgccccaatgggcatacatgcacatcgccggacaggatgcttcggagtacctgagtccgggtctggtgcagttcgcccgcgccacagacacctacttcaatctgggaaataagtttagaaatcccaccgtagcgccgacccacgatgtgaccaccgaccgtagccagcggctcatgttgcgcttcgtgcccgttgaccgggaggacaatacatactcttacaaagtgcggtacaccctggccgtgggcgacaacagagtgctggatatggccagcacgttctttgacattaggggcgtgttggacagaggtcccagtttcaaaccctattctggtacggcttacaactctctggctcctaaaggcgctccaaatgcatctcaatggattgcaaaaggcgtaccaactgcagcagccgcaggcaatggtgaagaagaacatgaaacagaggagaaaactgctacttacacttttgccaatgctcctgtaaaagccgaggctcaaattacaaaagagggcttaccaataggtttggagatttcagctgaaaacgaatctaaacccatctatgcagataaactttatcagccagaacctcaagtgggagatgaaacttggactgacctagacggaaaaaccgaagagtatggaggcagggctctaaagcctactactaacatgaaaccctgttacgggtcctatgcgaagcctactaatttaaaaggtggtcaggcaaaaccgaaaaactcggaaccgtcgagtgaaaaaattgaatatgatattgacatggaattttttgataactcatcgcaaagaacaaacttcagtcctaaaattgtcatgtatgcagaaaatgtaggtttggaaacgccagacactcatgtagtgtacaaacctggaacagaagacacaagttccgaagctaatttgggacaacagtctatgcccaacagacccaactacattggcttcagagataactttattggactcatgtactataacagtactggtaacatgggggtgctggctggtcaagcgtctcagttaaatgcagtggttgacttgcaggacagaaacacagaactttcttaccaactcttgcttgactctctgggcgacagaaccagatactttagcatgtggaatcaggctgtggacagttatgatcctgatgtacgtgttattgaaaatcatggtgtggaagatgaacttcccaactattgttttccactggacggcataggtgttccaacaaccagttacaaatcaatagttccaaatggagaagataataataattggaaagaacctgaagtaaatggaacaagtgagatcggacagggtaatttgtttgccatggaaattaaccttcaagccaatctatggcgaagtttcctttattccaatgtggctctgtatctcccagactcgtacaaatacaccccgtccaatgtcactcttccagaaaacaaaaacacctacgactacatgaacgggcgggtggtgccgccatctctagtagacacctatgtgaacattggtgccaggtggtctctggatgccatggacaatgtcaacccattcaaccaccaccgtaacgctggcttgcgttaccgatctatgcttctgggtaacggacgttatgtgcctttccacatacaagtgcctcaaaaattcttcgctgttaaaaacctgctgcttctcccaggctcctacacttatgagtggaactttaggaaggatgtgaacatggttctacagagttccctcggtaacgacctgcgggtagatggcgccagcatcagtttcacgagcatcaacctctatgctacttttttccccatggctcacaacaccgcttccacccttgaagccatgctgcggaatgacaccaatgatcagtcattcaacgactacctatctgcagctaacatgctctaccccattcctgccaatgcaaccaatattcccatttccattccttctcgcaactgggcggctttcagaggctggtcatttaccagactgaaaaccaaagaaactccctctttggggtctggatttgacccctactttgtctattctggttctattccctacctggatggtaccttctacctgaaccacacttttaagaaggtttccatcatgtttgactcttcagtgagctggcctggaaatgacaggttactatctcctaacgaatttgaaataaagcgcactgtggatggcgaaggctacaacgtagcccaatgcaacatgaccaaagactggttcttggtacagatgctcgccaactacaacatcggctatcagggcttctacattccagaaggatacaaagatcgcatgtattcatttttcagaaacttccagcccatgagcaggcaggtggttgatgaggtcaattacaaagacttcaaggccgtcgccataccctaccaacacaacaactctggctttgtgggttacatggctccgaccatgcgccaaggtcaaccctatcccgctaactatccctatccactcattggaacaactgccgtaaatagtgttacgcagaaaaagttcttgtgtgacagaaccatgtggcgcataccgttctcgagcaacttcatgtctatgggggcccttacagacttgggacagaatatgctctatgccaactcagctcatgctctggacatgacctttgaggtggatcccatggatgagcccaccctgctttatcttctcttcgaagttttcgacgtggtcagagtgcatcagccacaccgcggcatcatcgaggcagtctacctgcgtacaccgttctcggccggtaacgctaccacgtaagaagcttcttgcttcttgcaaatagcagctgcaaccatggcctgcggatcccaaaacggctccagcgagcaagagctcagagccattgtccaagacctgggttgcggaccctattttttgggaacctacgataagcgcttcccggggttcatggcccccgataagctcgcctgtgccattgtaaatacggccggacgtgagacggggggagagcactggttggctttcggttggaacccacgttctaacacctgctacctttttgatccttttggattctcggatgatcgtctcaaacagatttaccagtttgaatatgagggtctcctgcgccgcagcgctcttgctaccaaggaccgctgtattacgctggaaaaatctacccagaccgtgcagggcccccgttctgccgcctgcggacttttctgctgcatgttccttcacgcctttgtgcactggcctgaccgtcccatggacggaaaccccaccatgaaattgctaactggagtgccaaacaacatgcttcattctcctaaagtccagcccaccctgtgtgacaatcaaaaagcactctaccattttcttaatacccattcgccttattttcgctctcatcgtacacacatcgaaagggccactgcgttcgaccgtatggatgttcaataatgactcatgtaaacaacgtgttcaataaacatcactttatttttttacatgtatcaaggctctggattacttatttatttacaagtcgaatgggttctgacgagaatcagaatgacccgcaggcagtgatacgttgcggaactgatacttgggttgccacttgaattcgggaatcaccaacttgggaaccggtatatcgggcaggatgtcactccacagctttctggtcagctgcaaagctccaagcaggtcaggagccgaaatcttgaaatcacaattaggaccagtgctctgagcgcgagagttgcggtacaccggattgcagcactgaaacaccatcagcgacggatgtctcacgcttgccagcacggtgggatctgcaatcatgcccacatccagatcttcagcattggcaatgctgaacggggtcatcttgcaggtctgcctacccatggcgggcacccaattaggcttgtggttgcaatcgcagtgcagggggatcagtatcatcttggcctgatcctgtctgattcctggatacacggctctcatgaaagcatcatattgcttgaaagcctgctgggctttactaccctcggtataaaacatcccgcaggacctgctcgaaaactggttagctgcacagccggcatcattcacacagcagcgggcgtcattgttggctatttgcaccacacttctgccccagcggttttgggtgattttggttcgctcgggattctcctttaaggctcgttgtccgttctcgctggccacatccatctcgataatctgctccttctgaatcataatattgccatgcaggcacttcagcttgccctcataatcattgcagccatgaggccacaacgcacagcctgtacattcccaattatggtgggcgatctgagaaaaagaatgtatcattccctgcagaaatcttcccatcatcgtgctcagtgtcttgtgactagtgaaagttaactggatgcctcggtgctcttcgtttacgtactggtgacagatgcgcttgtattgttcgtgttgctcaggcattagtttaaaacaggttctaagttcgttatccagcctgtacttctccatcagcagacacatcacttccatgcctttctcccaagcagacaccaggggcaagctaatcggattcttaacagtgcaggcagcagctcctttagccagagggtcatctttagcgatcttctcaatgcttcttttgccatccttctcaacgatgcgcacgggcgggtagctgaaacccactgctacaagttgcgcctcttctctttcttcttcgctgtcttgactgatgtcttgcatggggatatgtttggtcttccttggcttctttttggggggtatcggaggaggaggactgtcgctccgttccggagacagggaggattgtgacgtttcgctcaccattaccaactgactgtcggtagaagaacctgaccccacacggcgacaggtgtttttcttcgggggcagaggtggaggcgattgcgaagggctgcggtccgacctggaaggcggatgactggcagaaccccttccgcgttcgggggtgtgctccctgtggcggtcgcttaactgatttccttcgcggctggccat

SEQ ID NO: 291 - DNA, 3424 bp, Human adenovirus
  misc_feature 1..3424: note = Ad35 E3 corresponds to positions 27199-30622 in NCBI accession no. AC_000019
  source 1..3424: mol_type = genomic DNA
atgtctggtgacgcggctgagctatctcggctgcgacatctagaccactgccgccgctttcgctgctttgcccgggaacttattgagttcatctacttcgaactccccaaggatcaccctcaaggtccggcccacggagtgcggattactatcgaaggcaaaatagactctcgcctgcaacgaattttctcccagcggcccgtgctgatcgagcgagaccagggaaacaccacggtttccatctactgcatttgtaatcaccccggattgcatgaaagcctttgctgtcttatgtgtactgagtttaataaaaactgaattaagactctcctacggactgccgcttcttcaacccggattttacaaccagaagaacaaaacttttcctgtcgtccaggactctgttaacttcacctttcctactcacaaactagaagctcaacgactacaccgcttttccagaagcattttccctactaatactactttcaaaaccggaggtgagctccacggtctccctacagaaaacccttgggtggaagcgggccttgtagtactaggaattcttgcgggtgggcttgtgattattctttgctacctatacacaccttgcttcactttcctagtggtgttgtggtattggtttaaaaaatggggcccatactagtcttgcttgttttactttcgcttttggaaccgggttctgccaattacgatccatgtctagactttgacccagaaaactgcacacttacttttgcacccgacacaagccgcatctgtggagttcttattaagtgcggatgggaatgcaggtccgttgaaattacacacaataacaaaacctggaacaataccttatccaccacatgggagccaggagttcccgagtggtacactgtctctgtccgaggtcctgacggttccatccgcattagtaacaacactttcattttttctgaaatgtgcgatctggccatgttcatgagcaaacagtattctctatggcctcctagcaaggacaacatcgtaacgttctccattgcttattgcttgtgcgcttgccttcttactgctttactgtgcgtatgcatacacctgcttgtaaccactcgcatcaaaaacgccaataacaaagaaaaaatgccttaacctctttctgtttacagacatggcttctcttacatctctcatatttgtcagcattgtcactgccgctcacggacaaacagtcgtctctatcccactaggacataattacactctcataggacccccaatcacttcagaggtcatctggaccaaactgggaagcgttgattactttgatataatctgtaacaaaacaaaaccaataatagtaacttgcaacatacaaaatcttacattgattaatgttagcaaagtttacagcggttactattatggttatgacagatacagtagtcaatatagaaattacttggttcgtgttacccagttgaaaaccacgaaaatgccaaatatggcaaagattcgatccgatgacaattctctagaaacttttacatctcccaccacacccgacgaaaaaaacatcccagattcaatgattgcaattgttgcagcggtggcagtggtgatggcactaataataatatgcatgcttttatatgcttgtcgctacaaaaagtttcatcctaaaaaacaagatctcctactaaggcttaacatttaatttctttttatacagccatggtttccactaccacattccttatgcttactagtctcgcaactctgacttctgctcgctcacacctcactgtaactataggctcaaactgcacactaaaaggacctcaaggtggtcatgtcttttggtggagaatatatgacaatggatggtttacaaaaccatgtgaccaacctggtagatttttctgcaacggcagagacctaaccattatcaacgtgacagcaaatgacaaaggcttctattatggaaccgactataaaagtagtttagattataacattattgtactgccatctaccactccagcaccccgcacaactactttctctagcagcagtgtcgctaacaatacaatttccaatccaacctttgccgcgcttttaaaacgcactgtgaataattctacaacttcacatacaacaatttccacttcaacaatcagcatcatcgctgcagtgacaattggaatatctattcttgtttttaccataacctactacgcctgctgctatagaaaagacaaacataaaggtgatccattacttagatttgatatttaatttgttctttttttttatttacagtatggtgaacaccaatcatggtacctagaaatttcttcttcaccatactcatctgtgcttttaatgtttgcgctactttcacagcagtagccacagcaaccccagactgtataggagcatttgcttcctatgcactttttgcttttgttacttgcatctgcgtatgtagcatagtctgcctggttattaattttttccaacttctagactggatccttgtgcgaattgcctacctgcgccaccatcccgaataccgcaaccaaaatatcgcggcacttcttagactcatctaaaaccatgcaggctatactaccaatatttttgcttctattgcttccctacgctgtctcaaccccagctgcctatagtactccaccagaacaccttagaaaatgcaaattccaacaaccgtggtcatttcttgcttgctatcgagaaaaatcagaaatccccccaaatttaataatgattgctggaataattaatataatctgttgcaccataatttcatttttgatataccccctatttgattttggctggaatgctcccaatgcacatgatcatccacaagacccagaggaacacattcccccacaaaacatgcaacatccaatagcgctaatagattacgaaagtgaaccacaacccccactactccctgctattagttacttcaacctaaccggcggagatgactgaaacactcaccacctccaattccgccgaggatctgctcgatatggacggccgcgtctcagaacaacgacttgcccaactacgcatccgccagcagcaggaacgcgtggccaaagagctcagagatgtcatccaaattcaccaatgcaaaaaaggcatattctgtttggtaaaacaagccaagatatcctacgagatcaccgctactgaccatcgcctctcttacgaacttggcccccaacgacaaaaatttacctgcatggtgggaatcaaccccatagttatcacccaacaaagtggagatactaagggttgcattcactgctcctgcgattccatcgagtgcacctacaccctgctgaagaccctatgcggcctaagagacctgctaccaatgaattaa

SEQ ID NO: 292 - DNA, 972 bp, Human adenovirus
  misc_feature 1..972: note = Ad35 fiber corresponds to positions 30827-31798 in NCBI accession no. AC_000019
  source 1..972: mol_type = genomic DNA
atgaccaagagagtccggctcagtgactccttcaaccctgtctacccctatgaagatgaaagcacctcccaacacccctttataaacccagggtttatttccccaaatggcttcacacaaagcccagacggagttcttactttaaaatgtttaaccccactaacaaccacaggcggatctctacagctaaaagtgggagggggacttacagtggatgacactgatggtaccttacaagaaaacatacgtgctacagcacccattactaaaaataatcactctgtagaactatccattggaaatggattagaaactcaaaacaataaactatgtgccaaattgggaaatgggttaaaatttaacaacggtgacatttgtataaaggatagtattaacaccttatggactggaataaaccctccacctaactgtcaaattgtggaaaacactaatacaaatgatggcaaacttactttagtattagtaaaaaatggagggcttgttaatggctacgtgtctctagttggtgtatcagacactgtgaaccaaatgttcacacaaaagacagcaaacatccaattaagattatattttgactcttctggaaatctattaactgaggaatcagacttaaaaattccacttaaaaataaatcttctacagcgaccagtgaaactgtagccagcagcaaagcctttatgccaagtactacagcttatcccttcaacaccactactagggatagtgaaaactacattcatggaatatgttactacatgactagttatgatagaagtctatttcccttgaacatttctataatgctaaacagccgtatgatttcttccaatgttgcctatgccatacaatttgaatggaatctaaatgcaagtgaatctccagaaagcaacatagctacgctgaccacatccccctttttcttttcttacattacagaagacgacaactaa

SEQ ID NO: 293 - DNA, 126 bp, Human adenovirus; identical to SEQ ID NO: 144
  misc_feature 1..126: note = Ad35 fiber tail corresponds to positions 30827-30952 in NCBI accession no. AC_000019
  source 1..126: mol_type = genomic DNA

SEQ ID NO: 294 - DNA, 273 bp, Human adenovirus; identical to SEQ ID NO: 217
  misc_feature 1..273: note = Ad35 fiber shaft corresponds to positions 30953-31225 in NCBI accession no. AC_000019
  source 1..273: mol_type = genomic DNA

SEQ ID NO: 295 - DNA, 573 bp, Human adenovirus; identical to SEQ ID NO: 254
  misc_feature 1..573: note = Ad35 fiber knob corresponds to positions 31226-31798 in NCBI accession no. AC_000019
  source 1..573: mol_type = genomic DNA

SEQ ID NO: 296 - DNA, 1686 bp, Human adenovirus; identical to SEQ ID NO: 255
  misc_feature 1..1686: note = Ad35 penton corresponds to positions 13690-15375 in NCBI accession no. AC_000019
  source 1..1686: mol_type = genomic DNA

SEQ ID NO: 297 - DNA, 2859 bp, Human adenovirus; identical to SEQ ID NO: 256
  misc_feature 1..2859: note = Ad35 hexon corresponds to positions 18257-21115 in NCBI accession no. AC_000019
  source 1..2859: mol_type = genomic DNA
